(19) United States
(12) Patent Application Publication
(10) Pub. No.: US 2019/0336504 A1
(43) Pub. Date: Nov. 7, 2019

(54) TREATMENT AND PREVENTION OF CYTOKINE RELEASE SYNDROME USING A CHIMERIC ANTIGEN RECEPTOR IN COMBINATION WITH A KINASE INHIBITOR

(71) Applicants: Saar Gill, (US); Saad Kenderian, (US); Marco Ruella, (US); Novartis AG, Basel (CH); The Trustees of the University of Pennsylvania, Philadelphia, PA (US)

(72) Inventors: Saar Gill, Philadelphia, PA (US); Saad Kenderian, Philadelphia, PA (US); Marco Ruella, Ardmore, PA (US)

(21) Appl. No.: 16/317,943

(22) PCT Filed: Jul. 14, 2017
(86) PCT No.: PCT/US2017/042129

§ 371 Date: Jan. 15, 2019

Related U.S. Application Data
(60) Provisional application No. 62/362,659, filed on Jul. 15, 2016.
(60) Provisional application No. 62/366,997, filed on Jul. 26, 2016.
(60) Provisional application No. 62/381,230, filed on Aug. 30, 2016.

(51) Int. Cl. A61K 31/519; A61P 37/02; A61K 39/395; A61K 35/17; A61P 35/00

(52) U.S. Cl. CPC A61K 31/519; A61P 37/02; A61K 2039/505; A61K 35/17; A61P 35/00; A61K 39/39558

(57) ABSTRACT

The disclosure provides compositions and methods for treating diseases associated with expression of an antigen or for treating or prevent cytokine release syndrome, e.g., by administering a CAR therapy with a kinase inhibitor, e.g., JAK-STAT inhibitor and/or BTK inhibitor.

[0001] This application claims priority to U.S. Ser. No. 62/362,659 filed Jul. 15, 2016, U.S. Ser. No. 62/366,997 filed Jul. 26, 2016, and U.S. Ser. No. 62/381,230 filed Aug. 30, 2016, the contents of all of which are incorporated herein by reference in their entireties.

### FIELD OF THE INVENTION

[0002] The present invention relates generally to the use of immune effector cells (e.g., T cells or NK cells) engineered to express a Chimeric Antigen Receptor (CAR), in combination with a kinase inhibitor (e.g., a JAK-STAT or a BTK inhibitor), to treat a disease and/or prevent cytokine release syndrome (CRS).

### BACKGROUND OF THE INVENTION

[0003] Many patients with hematological malignancies (e.g., B cell malignancies) are incurable with standard therapy. In addition, traditional treatment options often have serious side effects. Recent developments using chimeric antigen receptor (CAR) modified autologous T cell (CART) therapy, which relies on redirecting T cells to a suitable cell-surface molecule on cancer cells such as B cell malignancies, show promising results in harnessing the power of the immune system to treat B cell malignancies and other cancers (see, e.g., Sadelain et al., Cancer Discovery 3:388-398 (2013)). The clinical results of the murine derived CART19 (i.e., “CTL019”) have shown promise in establishing complete remissions in patients suffering with CLL as well as in childhood ALL (see, e.g., Kalos et al., Sci Transl Med 3:95ra73 (2011), Porter et al., NEJM 365:725-733 (2011), Grupp et al., NEJM 368:1509-1518 (2013)). Besides the ability for the chimeric antigen receptor on the genetically modified T cells to recognize and destroy the targeted cells, a successful therapeutic T cell therapy needs to have the ability to proliferate and persist over time, and to further monitor for leukemic cell escape. The variable quality of T cells whether it's a result of anergy, suppression or exhaustion will have effects on CAR-transformed T cells' performance but for which skilled practitioners have limited control over at this time. To be effective, CAR transformed patient T cells need to persist and maintain the ability to proliferate in response to the target antigen. It has been shown that ALL patient T cells perform can do this with CART19 comprising a murine scFv (see, e.g., Grupp et al., NEJM 368:1509-1518 (2013)).

[0004] Cytokine release syndrome (CRS) is a serious and common adverse side effect of immune cell-based therapies, e.g., CAR T cell treatment. Severe CRS is a potentially life-threatening toxicity. Deaths with severe cases of CRS have been reported. Diagnosis and management of CRS in response to immune cell-based therapies is routinely based on clinical parameters and symptoms, e.g., see CRS grading scale as described by Lee, D. et al. (2014) Blood 124(2):188-195. While the interleukin-6 receptor blocker tocilizumab and steroids can reverse CRS, concerns remain that these approaches may impair the anti-tumor effects. Also, there is a lack of preclinical models for CRS after human CART. There is a need for preclinical models for CRS after human CART administration. Also, there is a need for CRS prevention modalities—such modalities would enhance the clinical feasibility of CART therapy.

### SUMMARY OF THE INVENTION

[0005] The present disclosure is based, at least in part, on the discovery that a JAK-STAT kinase inhibitor, such as ruxolitinib, can ameliorate cytokine release syndrome (CRS) severity or prevent CRS after CART cell therapy for hematological cancers, such as acute myeloid leukemia (AML), without significantly impairing anti-tumor effect of the CART therapy. The present disclosure is also based, at least in part, on the discovery that a BTK inhibitor, such as ibrutinib, can improve or prevent CRS after a CD19 CAR therapy for B cell neoplasms. Additionally, the disclosure is based, at least in part, on the discovery that an IL-6 inhibitor (e.g., which can be used for CRS prevention/treatment) can be administered in combination with (e.g., before, concurrently, or after) a CAR therapy, without decreasing the anti-cancer efficacy of the CAR therapy.

[0006] Without wishing to be bound by theory, treating a subject having a disease described herein, e.g., a cancer described herein, with a combination therapy that includes a CAR-expressing cell and a JAK-STAT or BTK inhibitor is believed to result in improved inhibition or reduction of tumor progression and/or reduced adverse effects (e.g., reduced CRS) in the subject, e.g., as compared to treating a subject having the disease with the CAR-expressing cell or the JAK-STAT or BTK inhibitor alone.

[0007] Accordingly, the disclosure features, at least in part, compositions and methods of treating disorders such as cancer (e.g., hematological cancers or other B-cell malignancies) using immune effector cells (e.g., T cells or NK cells) that express a Chimeric Antigen Receptor (CAR) molecule (e.g., a CAR that binds to a B-cell antigen, e.g., CD123 or Cluster of Differentiation 19 protein (CD19) (e.g., OMIM Acc. No. 107265, Swiss Prot. Acc No. P15391)). The compositions include, and the methods include administering, immune effector cells (e.g., T cells or NK cells) expressing a CAR (e.g., a B cell targeting CAR), in combination with a kinase inhibitor (e.g., one or more of a JAK-STAT inhibitor and/or a BTK inhibitor). In some embodiments, the combination maintains, has better clinical effectiveness, and/or has lower toxicity (e.g., due to prevention of CRS) as compared to either therapy alone. In some embodiments, the subject is at risk of, or has, CRS; or the subject has been identified as having or at risk of developing CRS.

[0008] The disclosure further pertains to the use of engineered cells, e.g., immune effector cells (e.g., T cells or NK cells), to express a CAR molecule that binds to an antigen (e.g., tumor antigen described herein, e.g., a B-cell antigen, e.g., CD123 or CD19, in combination with a kinase inhibitor (e.g., at least one JAK-STAT inhibitor) to treat a disorder associated with expression of a B-cell antigen, e.g., CD123 or CD19 (e.g., a cancer, e.g., a hematological cancer).

[0009] Also provided herein are compositions and methods for preventing CRS in a subject by using a combination of a JAK-STAT inhibitor with a CAR-expressing cell (e.g., a B cell targeting CAR-expressing cell, e.g., CD123 CAR-expressing cell).

[0010] Also provided are compositions and methods for preventing CRS in a subject by using a combination of a BTK inhibitor with a CAR-expressing cell (e.g., B cell targeting CAR-expressing cell, e.g., a CD19 CAR-expressing cell), e.g., where the subject is at risk of, or has, CRS; or the subject has been identified as having or at risk of developing CRS.

[0011] In an aspect, provided herein is a method of treating a subject, e.g., a mammal, having a disease associated with expression of an antigen, e.g., tumor antigen, e.g., tumor antigen described herein. The method comprises administering to the subject an effective amount of a cell e.g., an immune effector cell (e.g., a T cell or NK cell) that expresses a CAR molecule that binds the antigen (e.g., antigen described herein, e.g., tumor antigen, e.g., B-cell antigen), in combination with a JAK-STAT inhibitor, e.g., a JAK-STAT inhibitor described herein, e.g., ruxolitinib.

[0012] In another aspect provided herein is a method of providing anti-tumor immunity to a subject, e.g., mammal, having a disease associated with expression of an antigen, e.g., tumor antigen, e.g., tumor antigen described herein. The method comprises administering to the subject an effective amount of a cell e.g., an immune effector cell (e.g., a T cell or NK cell) that expresses a CAR molecule that binds the antigen (e.g., antigen described herein, e.g., tumor antigen, e.g., B-cell antigen), in combination with a JAK-STAT inhibitor, e.g., a JAK-STAT inhibitor described herein, e.g., ruxolitinib.

[0013] In one embodiment, the CAR molecule binds to CD123, e.g., a CAR molecule that binds CD123 described herein.

[0014] In another aspect, provided herein is a method of treatment and/or preventing cytokine release syndrome (CRS), e.g., CRS associated with a CAR therapy (e.g., a CAR-expressing cell described herein) in a subject in need thereof, comprising administering a JAK-STAT inhibitor (e.g., ruxolitinib), alone or in combination with the CAR therapy, to the subject, thereby treating and/or preventing CRS in the subject.

[0015] In embodiments, the subject is at risk of developing, has, or is diagnosed with CRS. In embodiments, the subject has been, is being, or will be administered a CAR therapy, e.g., a CAR-expressing cell described herein.

[0016] In embodiments, the method further comprises administering an IL-6 inhibitor (e.g., an anti-IL6 receptor inhibitor, e.g., tocilizumab) to the subject. In embodiments, the method comprises administering to the subject (i) a JAK-STAT inhibitor (e.g., ruxolitinib), (ii) a CAR therapy (e.g., CAR-expressing cell described herein), and (iii) an IL-6 inhibitor (e.g., an anti-IL6 receptor inhibitor, e.g., tocilizumab).

[0017] In another aspect, provided herein is a method of preventing cytokine release syndrome (CRS) (e.g., CRS associated with a CAR therapy, e.g., B cell antigen CAR therapy, e.g., CD19 CAR therapy) in a subject in need thereof, comprising administering a BTK inhibitor (e.g., ibrutinib), alone or in combination with the CAR therapy, to the subject, thereby preventing CRS in the subject.

[0018] In embodiments, the subject is at risk of developing, has, or is diagnosed with CRS. In embodiments, the subject has been, is being, or will be administered a CAR therapy, e.g., a CAR therapy described herein. In embodiments, the subject is identified or has previously been identified as at risk for CRS.

[0019] In embodiments, the method comprises selecting the subject for administration of the BTK inhibitor. In embodiments, the subject is selected based on (i) his or her risk of developing CRS, (ii) his or her diagnosis of CRS, and/or (iii) whether he or she has been, is being, or will be administered a CAR therapy (e.g., a CAR therapy described herein, e.g., CAR19 therapy, e.g., CTL019). In embodiments, the subject is selected for administration of the BTK inhibitor if the subject is diagnosed with CRS, e.g., severe or non-severe CRS. In embodiments, the subject is selected for administration of the BTK inhibitor if the subject is at risk of (e.g., identified as at risk of) developing CRS. In embodiments, the subject is selected for administration of the BTK inhibitor if the subject has been, is being, or will be administered a CAR therapy (e.g., a CAR therapy described herein, e.g., CAR19 therapy, e.g., CTL019).

[0020] In embodiments, the method further comprises administering an IL-6 inhibitor (e.g., an anti-IL6 receptor inhibitor, e.g., tocilizumab) to the subject. In embodiments, the method comprises administering to the subject (i) a BTK inhibitor (e.g., ibrutinib), (ii) a CAR therapy (e.g., CAR-expressing cell described herein), and (iii) an IL-6 inhibitor (e.g., an anti-IL6 receptor inhibitor, e.g., tocilizumab).

[0021] In yet another aspect, provided herein is a method of treating or preventing CRS associated with administration of a cell, e.g., a population of cells, expressing a CAR in a subject.

[0022] In yet another aspect, provided herein is a method of treating or preventing CRS associated with administration of a T cell inhibitor therapy, e.g., a CD19-inhibiting or depleting therapy, e.g., a therapy that includes a CD19 inhibitor. In embodiments, the CD19-inhibiting or depleting therapy is associated with CRS.

[0023] The method of treating or preventing CRS comprising administering to the subject an IL-6 inhibitor (e.g., an anti-IL6 receptor inhibitor, e.g., tocilizumab) prior to, simultaneously with, or within 1 day (e.g, within 24 hours, 12 hours, 6 hours, 5, hours, 4 hours, 3 hours, 2 hours, 1 hour or less) of, administration of a dose (e.g., a first dose) of said cell, e.g., said population of cells, expressing a CAR, or said therapy.

[0024] In embodiments, the IL-6 inhibitor (e.g., tocilizumab) is administered upon (e.g., within 1 hour, 30 minutes, 20 minutes, 15 minutes or less) a first sign of a symptom of CRS (e.g., a fever, e.g., characterized by a temperature of at least 38° C. (e.g., at least 38.5° C.), e.g., for two successive measurements in 24 hours (e.g., at least 4, 5, 6, 7, 8 hours, or more, apart)) in the subject.

[0025] The following embodiments pertain to any methods and compositions described herein.

### CAR Molecules

[0026] In embodiments, the CAR molecule comprises an antigen binding domain (e.g., B cell antigen binding domain, CD123 binding domain, or CD19 binding domain), transmembrane domain, and an intracellular signaling domain (e.g., an intracellular signaling domain comprising a costimulatory domain and/or a primary signaling domain).

[0027] In embodiments, the CAR comprises an antigen binding domain that binds one or more of the following: CD19; CD123; CD22; CD30; CD171; CS-1 (also referred to as CD2 subset 1, CRACC, SLAMF7, CD319, and 19A24); C-type lectin-like molecule-1 (CLL-1 or CLECL1); CD33; epidermal growth factor receptor variant III (EGFRvIII); ganglioside G2 (GD2); ganglioside GD3 (aNeu5Ac(2-8)aNeu5Ac(2-3)bDGalp(1-4)bDGlcp(1-1)Cer); TNF receptor family member B cell maturation (BCMA); Tn antigen ((Tn Ag) or (GalNAcα-Ser/Thr)); prostate-specific membrane antigen (PSMA); Receptor tyrosine kinase-like orphan receptor 1 (ROR1); Fms-Like Tyrosine Kinase 3 (FLT3); Tumor-associated glycoprotein 72 (TAG72); CD38; CD44v6; Carcinoembryonic antigen (CEA); Epithelial cell adhesion molecule (EPCAM); B7H3 (CD276); KIT (CD117); Interleukin-13 receptor subunit alpha-2 (IL-13Ra2 or CD213A2); Mesothelin; Interleukin 11 receptor alpha (IL-11Ra); prostate stem cell antigen (PSCA); Protease Serine 21 (Testisin or PRSS21); vascular endothelial growth factor receptor 2 (VEGFR2); Lewis(Y) antigen; CD24; Platelet-derived growth factor receptor beta (PDGFR-beta); Stage-specific embryonic antigen-4 (SSEA-4); CD20; Folate receptor alpha; Receptor tyrosine-protein kinase ERBB2 (Her2/neu); Mucin 1, cell surface associated (MUC1); epidermal growth factor receptor (EGFR); neural cell adhesion molecule (NCAM); Prostase; prostatic acid phosphatase (PAP); elongation factor 2 mutated (ELF2M); Ephrin B2; fibroblast activation protein alpha (FAP); insulin-like growth factor 1 receptor (IGF-I receptor), carbonic anhydrase IX (CAIX); Proteasome (Prosome, Macropain) Subunit, Beta Type, 9 (LMP2); glycoprotein 100 (gp100); oncogene fusion protein consisting of breakpoint cluster region (BCR) and Abelson murine leukemia viral oncogene homolog 1 (Abl) (bcr-abl); tyrosinase; ephrin type-A receptor 2 (EphA2); Fucosyl GM1; sialyl Lewis adhesion molecule (sLe); ganglioside GM3 (aNeu5Ac(2-3)bDGalp(1-4)bDGlcp(1-1)Cer); transglutaminase 5 (TGS5); high molecular weight-melanoma-associated antigen (HMWMAA); o-acetyl-GD2 ganglioside (OAcGD2); Folate receptor beta; tumor endothelial marker 1 (TEM1/CD248); tumor endothelial marker 7-related (TEM7R); claudin 6 (CLDN6); thyroid stimulating hormone receptor (TSHR); G protein-coupled receptor class C group 5, member D (GPRC5D); chromosome X open reading frame 61 (CXORF61); CD97; CD179a; anaplastic lymphoma kinase (ALK); Polysialic acid; placenta-specific 1 (PLAC1); hexasaccharide portion of globoH glycoceramide (GloboH); mammary gland differentiation antigen (NY-BR-1); uroplakin 2 (UPK2); Hepatitis A virus cellular receptor 1 (HAVCR1); adrenoceptor beta 3 (ADRB3); pannexin 3 (PANX3); G protein-coupled receptor 20 (GPR20); lymphocyte antigen 6 complex, locus K 9 (LY6K); Olfactory receptor 51E2 (OR51E2); TCR Gamma Alternate Reading Frame Protein (TARP); Wilms tumor protein (WT1); Cancer/testis antigen 1 (NY-ESO-1); Cancer/testis antigen 2 (LAGE-1a); Melanoma-associated antigen 1 (MAGE-A1); ETS translocation-variant gene 6, located on chromosome 12p (ETV6-AML); sperm protein 17 (SPA17); X Antigen Family, Member 1A (XAGE1); angiopoietin-binding cell surface receptor 2 (Tie 2); melanoma cancer testis antigen-1 (MAD-CT-1); melanoma cancer testis antigen-2 (MAD-CT-2); Fos-related antigen 1; tumor protein p53 (p53); p53 mutant; prostein; surviving; telomerase; prostate carcinoma tumor antigen-1 (PCTA-1 or Galectin 8), melanoma antigen recognized by T cells 1 (MelanA or MART1); Rat sarcoma (Ras) mutant; human Telomerase reverse transcriptase (hTERT); sarcoma translocation breakpoints; melanoma inhibitor of apoptosis (ML-IAP); ERG (transmembrane protease, serine 2 (TMPRSS2) ETS fusion gene); N-Acetyl glucosaminyl-transferase V (NA17); paired box protein Pax-3 (PAX3); Androgen receptor; Cyclin B1; v-myc avian myelocytomatosis viral oncogene neuroblastoma derived homolog (MYCN); Ras Homolog Family Member C (RhoC); Tyrosinase-related protein 2 (TRP-2); Cytochrome P450 1B1 (CYP1B1); CCCTC-Binding Factor (Zinc Finger Protein)-Like (BORIS or Brother of the Regulator of Imprinted Sites), Squamous Cell Carcinoma Antigen Recognized By T Cells 3 (SART3); Paired box protein Pax-5 (PAX5); proacrosin binding protein sp32 (OY-TES1); lymphocyte-specific protein tyrosine kinase (LCK); A kinase anchor protein 4 (AKAP-4); synovial sarcoma, X breakpoint 2 (SSX2); Receptor for Advanced Glycation Endproducts (RAGE-1); renal ubiquitous 1 (RU1); renal ubiquitous 2 (RU2); legumain; human papilloma virus E6 (HPV E6); human papilloma virus E7 (HPV E7); intestinal carboxyl esterase; heat shock protein 70-2 mutated (mut hsp70-2); CD79a; CD79b; CD72; Leukocyte-associated immunoglobulin-like receptor 1 (LAIR1); Fc fragment of IgA receptor (FCAR or CD89); Leukocyte immunoglobulin-like receptor subfamily A member 2 (LILRA2); CD300 molecule-like family member f (CD300LF); C-type lectin domain family 12 member A (CLEC12A); bone marrow stromal cell antigen 2 (BST2); EGF-like module-containing mucin-like hormone receptor-like 2 (EMR2); lymphocyte antigen 75 (LY75); Glypican-3 (GPC3); Fc receptor-like 5 (FCRL5); or immunoglobulin lambda-like polypeptide 1 (IGLL1).

[0028] In other embodiment, the CAR molecule is capable of binding an antigen described herein, e.g., an antigen described in the Antigens section below.

[0029] In one embodiment, the antigen comprises a B cell antigen, e.g., CD10, CD19, CD20, CD22, CD34, CD123, FLT-3, ROR1, CD79b, CD179b, and/or CD79a.

[0030] In embodiments, the antigen is CD123. In embodiments, the antigen is CD19.

[0031] In other embodiments, the antigen is BCMA. In embodiments, the antigen is CLL.

### Exemplary CAR Molecules

[0032] In an embodiment, the CAR molecule comprises a CD123 CAR described herein, e.g., a CD123 CAR described in US2014/0322212A1 or US2016/0068601A1, both incorporated herein by reference. In embodiments, the CD123 CAR comprises an amino acid, or has a nucleotide sequence shown in US2014/0322212A1 or US2016/0068601A1, both incorporated herein by reference.

[0033] In embodiments, the CAR molecule comprises a CD19 CAR molecule described herein, e.g., a CD19 CAR molecule described in US-2015-0283178-A1, e.g., CTL019. In embodiments, the CD19 CAR comprises an amino acid, or has a nucleotide sequence shown in US-2015-0283178-A1, incorporated herein by reference.

[0034] In one embodiment, CAR molecule comprises a BCMA CAR molecule described herein, e.g., a BCMA CAR described in US-2016-0046724-A1. In embodiments, the BCMA CAR comprises an amino acid, or has a nucleotide sequence shown in US-2016-0046724-A1, incorporated herein by reference.

[0035] In an embodiment, the CAR molecule comprises a CLL1 CAR described herein, e.g., a CLL1 CAR described in US2016/0051651A1, incorporated herein by reference. In embodiments, the CLL1 CAR comprises an amino acid, or has a nucleotide sequence shown in US2016/0051651A1, incorporated herein by reference.

[0036] In an embodiment, the CAR molecule comprises a CD33 CAR described herein, e.ga CD33 CAR described in US2016/0096892A1, incorporated herein by reference. In embodiments, the CD33 CAR comprises an amino acid, or has a nucleotide sequence shown in US2016/0096892A1, incorporated herein by reference.

[0037] In an embodiment, the CAR molecule comprises an EGFRvIII CAR molecule described herein, e.g., an EGFRvIII CAR described US2014/0322275A1, incorporated herein by reference. In embodiments, the EGFRvIII CAR comprises an amino acid, or has a nucleotide sequence shown in US2014/0322275A1, incorporated herein by reference.

[0038] In an embodiment, the CAR molecule comprises a mesothelin CAR described herein, e.g., a mesothelin CAR described in WO 2015/090230, incorporated herein by reference. In embodiments, the mesothelin CAR comprises an amino acid, or has a nucleotide sequence shown in WO 2015/090230, incorporated herein by reference.

### CD123 CAR Antigen Binding Domains

[0039] In embodiments, the CAR molecule is capable of binding CD123 (e.g., wild-type or mutant CD123). In embodiments, the CAR molecule comprises an anti-CD123 binding domain comprising one or more (e.g., all three) light chain complementary determining region 1 (LC CDR1), light chain complementary determining region 2 (LC CDR2), and light chain complementary determining region 3 (LC CDR3) of an anti-CD123 binding domain described herein (e.g., described in US2014/0322212A1 or US2016/0068601A1), and/or one or more (e.g., all three) heavy chain complementary determining region 1 (HC CDR1), heavy chain complementary determining region 2 (HC CDR2), and heavy chain complementary determining region 3 (HC CDR3) of an anti-CD123 binding domain described herein (e.g., described in US2014/0322212A1 or US2016/0068601A1), e.g., an anti-CD123 binding domain comprising one or more, e.g., all three, LC CDRs and one or more, e.g., all three, HC CDRs.

[0040] In one embodiment, the encoded CD123 binding domain comprises one or more (e.g., all three) light chain complementary determining region 1 (LC CDR1), light chain complementary determining region 2 (LC CDR2), and light chain complementary determining region 3 (LC CDR3) of a CD123 binding domain described herein, and/or one or more (e.g., all three) heavy chain complementary determining region 1 (HC CDR1), heavy chain complementary determining region 2 (HC CDR2), and heavy chain complementary determining region 3 (HC CDR3) of a CD123 binding domain described herein, e.g., a CD123 binding domain comprising one or more, e.g., all three, LC CDRs and one or more, e.g., all three, HC CDRs. In one embodiment, the encoded CD123 binding domain (e.g., a human or humanized CD123 binding domain) comprises a light chain variable region described herein (e.g., in Tables 11A, 12A or 12B) and/or a heavy chain variable region described herein (e.g., in Tables 11A, 12A or 12B). In one embodiment, the encoded CD123 binding domain is a scFv comprising a light chain and a heavy chain of an amino acid sequence of Tables 11A, 12A or 12B. In an embodiment, the CD123 binding domain (e.g., an scFv) comprises: a light chain variable region comprising an amino acid sequence having at least one, two or three modifications (e.g., substitutions, e.g., conservative substitutions) but not more than 30, 20 or 10 modifications (e.g., substitutions, e.g., conservative substitutions) of an amino acid sequence of a light chain variable region provided in Tables 11A, 12A or 12B, or a sequence with at least 95%, e.g., 95-99%, identity with an amino acid sequence of Tables 11A, 12A or 12B; and/or a heavy chain variable region comprising an amino acid sequence having at least one, two or three modifications (e.g., substitutions, e.g., conservative substitutions) but not more than 30, 20 or 10 modifications (e.g., substitutions, e.g., conservative substitutions) of an amino acid sequence of a heavy chain variable region provided in Tables 11A, 12A or 12B, or a sequence at least 95% (e.g., 95-99%) identity to an amino acid sequence of Tables 11A, 12A or 12B.

[0041] In other embodiments, the encoded CD123 binding domain comprises a HC CDR1, a HC CDR2, and a HC CDR3 of any CD123 heavy chain binding domain amino acid sequences listed in Table 11A, 12A or 12B. In embodiments, the CD33 binding domain further comprises a LC CDR1, a LC CDR2, and a LC CDR3. In embodiments, the CD123 binding domain comprises a LC CDR1, a LC CDR2, and a LC CDR3 of any CD123 light chain binding domain amino acid sequences listed in Table 11A, 12A or 12B.

[0042] In some embodiments, the encoded CD123 binding domain comprises one, two or all of LC CDR1, LC CDR2, and LC CDR3 of any CD123 light chain binding domain amino acid sequences listed in Table 11A or 12B, and one, two or all of HC CDR1, HC CDR2, and HC CDR3 of any CD123 heavy chain binding domain amino acid sequences listed in Table 11A, 12A or 12B.

[0043] In one embodiment, the encoded CD123 binding domain comprises an amino acid sequence selected from a group consisting of SEQ ID NO:157-160, 184-215, 478, 480, 483, and 485. In an embodiment, the encoded CD123 binding domain (e.g., an scFv) comprises an amino acid sequence having at least one, two or three modifications (e.g., substitutions, e.g., conservative substitutions) but not more than 30, 20 or 10 modifications (e.g., substitutions, e.g., conservative substitutions) of an amino acid sequence of 157-160, 184-215, 478, 480, 483, and 485, or a sequence at least 95% identical to (e.g., with 95-99% identity with) an amino acid sequence of SEQ ID NO: 157-160, 184-215, 478, 480, 483, and 485.

[0044] In another embodiment, the encoded CD123 binding domain comprises a heavy chain variable region comprising an amino acid sequence selected from the group consisting of SEQ ID NO: 216-219 or 243-274, or an amino acid sequence having at least one, two or three modifications (e.g., substitutions, e.g., conservative substitutions) but not more than 30, 20 or 10 modifications (e.g., substitutions, e.g., conservative substitutions) of SEQ ID NO: 216-219 or 243-274, or a sequence at least 95% identical to (e.g., with 95-99% identity with) SEQ ID NO: 216-219 or 243-274. In another embodiment, the encoded CD123 binding domain comprises a heavy chain variable region comprising an amino acid sequence corresponding to the heavy chain variable region of SEQ ID NO:478, 480, 483, or 485, or an amino acid sequence having at least one, two or three modifications (e.g., substitutions, e.g., conservative substitutions) but not more than 30, 20 or 10 modifications (e.g., substitutions, e.g., conservative substitutions) of the corresponding portion of SEQ ID NO:478, 480, 483, or 485, or a sequence at least 95% identical to (e.g., with 95-99% identity with) to the corresponding portion of SEQ ID NO:478, 480, 483, or 485.

[0045] In another embodiment, the encoded CD123 binding domain comprises a light chain variable region comprising an amino acid sequence selected from the group consisting of SEQ ID NO: 275-278 or 302-333, or an amino acid sequence having at least one, two or three modifications (e.g., substitutions, e.g., conservative substitutions) but not more than 30, 20 or 10 modifications (e.g., substitutions, e.g., conservative substitutions) of SEQ ID NO: 275-278 or 302-333, or a sequence at least 95% identical to (e.g., with 95-99% identity with) SEQ ID NO: 275-278 or 302-333. In another embodiment, the encoded CD123 binding domain comprises a light chain variable region comprising an amino acid sequence corresponding to the light chain variable region of SEQ ID NO:478, 480, 483, or 485, or an amino acid sequence having at least one, two or three modifications (e.g., substitutions, e.g., conservative substitutions) but not more than 30, 20 or 10 modifications (e.g., substitutions, e.g., conservative substitutions) of the corresponding portion of SEQ ID NO:478, 480, 483, or 485, or a sequence at least 95% identical to (e.g., with 95-99% identity with) the corresponding portion of SEQ ID NO:478, 480, 483, or 485.

[0046] In one embodiment, the nucleic acid molecule encoding the scFv comprises a nucleotide sequence selected from the group consisting of SEQ ID NO: 479, 481, 482, 484, or a sequence with at least 95% identity, e.g., 95-99% identity thereof. In one embodiment, the nucleic acid molecule comprises a nucleotide sequence encoding the heavy chain variable region and/or the light chain variable region, wherein said nucleotide sequence comprises a portion of a nucleotide sequence selected from the group consisting of SEQ ID NO: 479, 481, 482, and 484, or a sequence with at least 95% identity, e.g., 95-99% identity thereof, corresponding to the heavy chain variable region and/or the light chain variable region. In one embodiment, the nucleic acid molecule comprises a nucleotide sequence encoding the heavy chain variable region and/or the light chain variable region, wherein the encoded amino acid sequence is selected from the group consisting of SEQ ID NO:157-160, or a sequence at least 95% identical (e.g., with 95-99% identity) thereof. In one embodiment, the nucleic acid molecule encodes an scFv comprising an amino acid sequence selected from the group consisting of SEQ ID NO:184-215, or a sequence with at least 95% identity, e.g., 95-99% identity thereof. In one embodiment, the nucleic acid molecule comprises a sequence encoding the heavy chain variable region and/or the light chain variable region, wherein the encoded amino acid sequence is selected from the group consisting of SEQ ID NO:184-215, or a sequence with at least 95% identity, e.g., 95-99% identity thereof.

[0047] In one embodiment, the encoded CD123 binding domain includes a (Gly4-Ser)n linker, wherein n is 1, 2, 3, 4, 5, or 6, preferably 3 or 4 (SEQ ID NO:26). The light chain variable region and heavy chain variable region of a scFv can be, e.g., in any of the following orientations: light chain variable region-linker-heavy chain variable region or heavy chain variable region-linker-light chain variable region.

### CD19 CAR Antigen Binding Domains

[0048] In embodiments, the CAR molecule is capable of binding CD19 (e.g., wild-type or mutant CD19). In embodiments, the CAR molecule comprises an anti-CD19 binding domain comprising one or more (e.g., all three) light chain complementary determining region 1 (LC CDR1), light chain complementary determining region 2 (LC CDR2), and light chain complementary determining region 3 (LC CDR3) of an anti-CD123 binding domain described herein, and/or one or more (e.g., all three) heavy chain complementary determining region 1 (HC CDR1), heavy chain complementary determining region 2 (HC CDR2), and heavy chain complementary determining region 3 (HC CDR3) of an anti-CD19 binding domain described herein, e.g., an anti-CD19 binding domain comprising one or more, e.g., all three, LC CDRs and one or more, e.g., all three, HC CDRs.

[0049] In one embodiment, the anti-CD19 binding domain comprises one or more (e.g., all three) heavy chain complementary determining region 1 (HC CDR1), heavy chain complementary determining region 2 (HC CDR2), and heavy chain complementary determining region 3 (HC CDR3) of an anti-CD19 binding domain described herein, e.g., the anti-CD19 binding domain has two variable heavy chain regions, each comprising a HC CDR1, a HC CDR2 and a HC CDR3 described herein. In one embodiment, the anti-CD19 binding domain comprises a murine light chain variable region described herein (e.g., in Table 14A) and/or a murine heavy chain variable region described herein (e.g., in Table 14A). In one embodiment, the anti-CD19 binding domain is a scFv comprising a murine light chain and a murine heavy chain of an amino acid sequence of Table 14A. In an embodiment, the anti-CD19 binding domain (e.g., an scFv) comprises: a light chain variable region comprising an amino acid sequence having at least one, two or three modifications (e.g., substitutions) but not more than 30, 20 or 10 modifications (e.g., substitutions) of an amino acid sequence of a light chain variable region provided in Table 14A, or a sequence with at least 95% identity, e.g., 95-99% identity, with an amino acid sequence of Table 14A; and/or a heavy chain variable region comprising an amino acid sequence having at least one, two or three modifications (e.g., substitutions) but not more than 30, 20 or 10 modifications (e.g., substitutions) of an amino acid sequence of a heavy chain variable region provided in Table 14A, or a sequence with at least 95% identity, e.g., 95-99% identity, to an amino acid sequence of Table 14A. In one embodiment, the anti-CD19 binding domain comprises a sequence of SEQ ID NO: 774, or a sequence with at least 95% identity, e.g., 95-99% identity, thereof. In one embodiment, the anti-CD19 binding domain is a scFv, and a light chain variable region comprising an amino acid sequence described herein, e.g., in Table 14A, is attached to a heavy chain variable region comprising an amino acid sequence described herein, e.g., in Table 14A, via a linker, e.g., a linker described herein. In one embodiment, the anti-CD19 binding domain includes a (Gly₄-Ser)n linker, wherein n is 1, 2, 3, 4, 5, or 6, preferably 3 or 4 (SEQ ID NO: 26). The light chain variable region and heavy chain variable region of a scFv can be, e.g., in any of the following orientations: light chain variable region-linker-heavy chain variable region or heavy chain variable region-linker-light chain variable region.

[0050] In one embodiment, the CAR molecule comprises a humanized anti-CD19 binding domain that includes one or more (e.g., all three) light chain complementary determining region 1 (LC CDR1), light chain complementary determining region 2 (LC CDR2), and light chain complementary determining region 3 (LC CDR3) of a humanized anti-CD19 binding domain described herein, and one or more (e.g., all three) heavy chain complementary determining region 1 (HC CDR1), heavy chain complementary determining region 2 (HC CDR2), and heavy chain complementary determining region 3 (HC CDR3) of a humanized anti-CD19 binding domain described herein, e.g., a humanized anti-CD19 binding domain comprising one or more, e.g., all three, LC CDRs and one or more, e.g., all three, HC CDRs. In one embodiment, the humanized anti-CD19 binding domain comprises at least HC CDR2. In one embodiment, the humanized anti-CD19 binding domain comprises one or more (e.g., all three) heavy chain complementary determining region 1 (HC CDR1), heavy chain complementary determining region 2 (HC CDR2), and heavy chain complementary determining region 3 (HC CDR3) of a humanized anti-CD19 binding domain described herein, e.g., the humanized anti-CD19 binding domain has two variable heavy chain regions, each comprising a HC CDR1, a HC CDR2 and a HC CDR3 described herein. In one embodiment, the humanized anti-CD19 binding domain comprises at least HC CDR2. In one embodiment, the light chain variable region comprises one, two, three or all four framework regions of VK3_L25 germline sequence. In one embodiment, the light chain variable region has a modification (e.g., substitution, e.g., a substitution of one or more amino acid found in the corresponding position in the murine light chain variable region of SEQ ID NO: 773, e.g., a substitution at one or more of positions 71 and 87). In one embodiment, the heavy chain variable region comprises one, two, three or all four framework regions of VH4_4-59 germline sequence. In one embodiment, the heavy chain variable region has a modification (e.g., substitution, e.g., a substitution of one or more amino acid found in the corresponding position in the murine heavy chain variable region of SEQ ID NO: 773, e.g., a substitution at one or more of positions 71, 73 and 78). In one embodiment, the humanized anti-CD19 binding domain comprises a light chain variable region described herein (e.g., in Table 13A) and/or a heavy chain variable region described herein (e.g., in Table 13A). In one embodiment, the humanized anti-CD19 binding domain is a scFv comprising a light chain and a heavy chain of an amino acid sequence of Table 13A. In an embodiment, the humanized anti-CD19 binding domain (e.g., an scFv) comprises: a light chain variable region comprising an amino acid sequence having at least one, two or three modifications (e.g., substitutions) but not more than 30, 20 or 10 modifications (e.g., substitutions) of an amino acid sequence of a light chain variable region provided in Table 13A, or a sequence with at least 95% identity, e.g., 95-99% identity, with an amino acid sequence of Table 13A; and/or a heavy chain variable region comprising an amino acid sequence having at least one, two or three modifications (e.g., substitutions) but not more than 30, 20 or 10 modifications (e.g., substitutions) of an amino acid sequence of a heavy chain variable region provided in Table 13A, or a sequence with at least 95% identity, e.g., 95-99% identity, to an amino acid sequence of Table 13A. In one embodiment, the humanized anti-CD19 binding domain comprises a sequence selected from the group consisting of SEQ ID NOs: 710-721, or a sequence with at least 95% identity, e.g., 95-99% identity, thereof. In one embodiment, the humanized anti-CD19 binding domain is a scFv, and a light chain variable region comprising an amino acid sequence described herein, e.g., in Table 13A, is attached to a heavy chain variable region comprising an amino acid sequence described herein, e.g., in Table 13A, via a linker, e.g., a linker described herein.

[0051] In embodiments, the antigen recognition domain binds CD19. In embodiments, the CAR comprises an amino acid sequence of a CD19 CAR described herein. In embodiments, the CAR comprises the amino acid sequence of SEQ ID NO: 773.

[0052] In one embodiment, the humanized anti-CD19 binding domain includes a (Gly₄-Ser)n linker, wherein n is 1, 2, 3, 4, 5, or 6, preferably 3 or 4 (SEQ ID NO: 26). The light chain variable region and heavy chain variable region of a scFv can be, e.g., in any of the following orientations: light chain variable region-linker-heavy chain variable region or heavy chain variable region-linker-light chain variable region.

### Other CAR Domains

[0053] In one embodiment, the CAR molecule comprises a transmembrane domain of a protein selected from the group consisting of the alpha, beta or zeta chain of the T-cell receptor, CD28, CD3 epsilon, CD45, CD4, CD5, CD8, CD9, CD16, CD22, CD33, CD37, CD64, CD80, CD86, CD134, CD137 and CD154. In one embodiment, the transmembrane domain comprises a sequence of SEQ ID NO: 6. In one embodiment, the transmembrane domain comprises an amino acid sequence having at least one, two or three modifications (e.g., substitutions) but not more than 20, 10 or 5 modifications (e.g., substitutions) of an amino acid sequence of SEQ ID NO: 6, or a sequence with at least 95% identity, e.g., 95-99% identity, to an amino acid sequence of SEQ ID NO: 6.

[0054] In one embodiment, the antigen binding domain (e.g., CD123 or CD19 binding domain) is connected to the transmembrane domain by a hinge region, e.g., a hinge region described herein. In one embodiment, the encoded hinge region comprises SEQ ID NO:2, SEQ ID NO: 4, or SEQ ID NO:3, or a sequence with at least 95% identity, e.g., 95-99% identity, thereof.

[0055] In one embodiment, the CAR molecule further comprises a sequence encoding a costimulatory domain, e.g., a costimulatory domain described herein. In one embodiment, the costimulatory domain comprises a functional signaling domain of a protein selected from the group consisting of OX40, CD2, CD27, CD28, CDS, ICAM-1, LFA-1 (CD11a/CD18), ICOS, and 4-1BB (CD137). In one embodiment, the costimulatory domain comprises a sequence of SEQ ID NO: 7. In one embodiment, the costimulatory domain comprises a sequence of SEQ ID NO:8. In one embodiment, the costimulatory domain comprises a sequence of SEQ ID NO:43. In one embodiment, the costimulatory domain comprises a sequence of SEQ ID NO:45. In one embodiment, the costimulatory domain comprises an amino acid sequence having at least one, two or three modifications (e.g., substitutions) but not more than 20, 10 or 5 modifications (e.g., substitutions) of an amino acid sequence of SEQ ID NO: 7, 8, 43, or 45, or a sequence with at least 95% identity, e.g., 95-99% identity, to an amino acid sequence of SEQ ID NO: 7, 8, 43, or 45.

[0056] In one embodiment, the CAR molecule further comprises a sequence encoding an intracellular signaling domain, e.g., an intracellular signaling domain described herein. In one embodiment, the intracellular signaling domain comprises a functional signaling domain of 4-1BB and/or a functional signaling domain of CD3 zeta. In one embodiment, the intracellular signaling domain comprises the sequence of SEQ ID NO: 7 and/or the sequence of SEQ ID NO: 9 or 10. In one embodiment, the intracellular signaling domain comprises a functional signaling domain of CD27 and/or a functional signaling domain of CD3 zeta. In one embodiment, the intracellular signaling domain comprises the sequence of SEQ ID NO: 8 and/or the sequence of SEQ ID NO: 9 or 10. In one embodiment, the intracellular signaling domain comprises an amino acid sequence having at least one, two or three modifications (e.g., substitutions) but not more than 20, 10 or 5 modifications (e.g., substitutions) of an amino acid sequence of SEQ ID NO:7 or SEQ ID NO:8 and/or an amino acid sequence of SEQ ID NO:9 or SEQ ID NO:10, or a sequence with at least 95% identity, e.g., 95-99% identity, to an amino acid sequence of SEQ ID NO:7 or SEQ ID NO:8 and/or an amino acid sequence of SEQ ID NO:9 or SEQ ID NO:10. In one embodiment, the intracellular signaling domain comprises the sequence of SEQ ID NO: 7 or SEQ ID NO:8 and the sequence of SEQ ID NO: 9 or SEQ ID NO:10, wherein the sequences comprising the intracellular signaling domain are expressed in the same frame and as a single polypeptide chain.

[0057] In one embodiment, the CAR molecule further comprises a leader sequence, e.g., a leader sequence described herein. In one embodiment, the leader sequence comprises an amino acid sequence of SEQ ID NO: 1, or a sequence with at least 95% identity, e.g., 95-99% identity, to an amino acid sequence of SEQ ID NO:1.

### CD123 CAR Construct

[0058] In embodiments, the CAR molecule comprises a leader sequence, e.g., a leader sequence described herein, e.g., a leader sequence of SEQ ID NO: 1, or having at least 95% identity, e.g., 95-99% identity, thereof, a CD123 binding domain described herein, e.g., a CD123 binding domain comprising a LC CDR1, a LC CDR2, a LC CDR3, a HC CDR1, a HC CDR2 and a HC CDR3 described herein, e.g., a CD123 binding domain described in Table 11A or 12A, or a sequence with at least 95% identity, e.g., 95-99% identity, thereof, a hinge region, e.g., a hinge region described herein, e.g., a hinge region of SEQ ID NO:2, or having at least 95% identity, e.g., 95-99% identity, thereof, a transmembrane domain, e.g., a transmembrane domain described herein, e.g., a transmembrane domain having a sequence of SEQ ID NO:6 or a sequence having at least 95% identity, e.g., 95-99% identity, thereof, an intracellular signaling domain, e.g., an intracellular signaling domain described herein (e.g., an intracellular signaling domain comprising a costimulatory domain and/or a primary signaling domain). In one embodiment, the intracellular signaling domain comprises a costimulatory domain, e.g., a costimulatory domain described herein, e.g., a 4-1BB costimulatory domain having a sequence of SEQ ID NO:7, or having at least 95% identity, e.g., 95-99% identity, thereof, and/or a primary signaling domain, e.g., a primary signaling domain described herein, e.g., a CD3 zeta stimulatory domain having a sequence of SEQ ID NO:9 or SEQ ID NO:10, or having at least 95% identity, e.g., 95-99% identity, thereof. In one embodiment, the intracellular signaling domain comprises a costimulatory domain, e.g., a costimulatory domain described herein, e.g., a 4-1BB costimulatory domain having a sequence of SEQ ID NO:7, and/or a primary signaling domain, e.g., a primary signaling domain described herein, e.g., a CD3 zeta stimulatory domain having a sequence of SEQ ID NO:9 or SEQ ID NO:10.

### CD19 CAR Construct

[0059] In one embodiment, the CAR molecule comprises a leader sequence, e.g., a leader sequence described herein, e.g., a leader sequence of SEQ ID NO: 1, or having at least 95% identity, e.g., 95-99% identity, thereof; an anti-CD19 binding domain described herein, e.g., an anti-CD19 binding domain comprising a LC CDR1, a LC CDR2, a LC CDR3, a HC CDR1, a HC CDR2 and a HC CDR3 described herein, e.g., a murine anti-CD19 binding domain described in Table 14A, a humanized anti-CD19 binding domain described in Table 13A, or a sequence with 95-99% identify thereof; a hinge region, e.g., a hinge region described herein, e.g., a hinge region of SEQ ID NO: 2, 3, or 4, or having at least 95% identity, e.g., 95-99% identity, thereof; a transmembrane domain, e.g., a transmembrane domain described herein, e.g., a transmembrane domain having a sequence of SEQ ID NO:6 or a sequence having at least 95% identity, e.g., 95-99% identity, thereof; an intracellular signaling domain, e.g., an intracellular signaling domain described herein (e.g., an intracellular signaling domain comprising a costimulatory domain and/or a primary signaling domain). In one embodiment, the intracellular signaling domain comprises a costimulatory domain, e.g., a costimulatory domain described herein, e.g., a 4-1BB costimulatory domain having a sequence of SEQ ID NO:7, a CD28 costimulatory domain having a sequence of SEQ ID NO:43, a CD27 costimulatory domain having a sequence of SEQ ID NO: 8, or an ICOS costimulatory domain having a sequence of SEQ ID NO: 45, or having at least 95% identity, e.g., 95-99% identity, thereof, and/or a primary signaling domain, e.g., a primary signaling domain described herein, e.g., a CD3 zeta stimulatory domain having a sequence of SEQ ID NO:9 or SEQ ID NO:10, or having at least 95% identity, e.g., 95-99% identity, thereof.

### Other Exemplary CAR Constructs

[0060] In one embodiment, the CAR molecule comprises (e.g., consists of) an amino acid sequence described in US-2015-0283178-A1, US-2016-0046724-A1, US2014/0322212A1, US2016/0068601A1, US2016/0051651A1, US2016/0096892A1, US2014/0322275A1, or WO2015/090230; or an amino acid sequence having at least one, two, three, four, five, 10, 15, 20 or 30 modifications (e.g., substitutions) but not more than 60, 50 or 40 modifications (e.g., substitutions) of an amino acid sequence described in US-2015-0283178-A1, US-2016-0046724-A1, US2014/0322212A1, US2016/0068601A1, US2016/0051651A1, US2016/0096892A1, US2014/0322275A1, or WO2015/090230; or an amino acid sequence having 85%, 90%, 95%, 96%, 97%, 98% or 99% identity to an amino acid sequence described in US-2015-0283178-A1, US-2016-0046724-A1, US2014/0322212A1, US2016/0068601A1, US2016/0051651A1, US2016/0096892A1, US2014/0322275A1, or WO2015/090230.

### Vectors

[0061] In one embodiment, the cell expressing the CAR molecule comprises a vector that includes a nucleic acid sequence encoding the CAR molecule. In one embodiment, the vector is selected from the group consisting of a DNA, a RNA, a plasmid, a lentivirus vector, adenoviral vector, or a retrovirus vector. In one embodiment, the vector is a lentivirus vector. In one embodiment, the vector further comprises a promoter. In one embodiment, the promoter is an EF-1 promoter. In one embodiment, the EF-1 promoter comprises a sequence of SEQ ID NO: 11. In one embodiment, the vector is an in vitro transcribed vector, e.g., a vector that transcribes RNA of a nucleic acid molecule described herein. In one embodiment, the nucleic acid sequence in the in vitro vector further comprises a poly(A) tail, e.g., a poly A tail described herein, e.g., comprising about 150 adenosine bases (SEQ ID NO:30). In one embodiment, the nucleic acid sequence in the in vitro vector further comprises a 3′UTR, e.g., a 3′ UTR described herein, e.g., comprising at least one repeat of a 3′UTR derived from human beta-globulin. In one embodiment, the nucleic acid sequence in the in vitro vector further comprises promoter, e.g., a T2A promoter.

### CAR-Expressing Cells

[0062] In certain embodiments of the compositions and methods disclosed herein, the cell expressing the CAR molecule (also referred to herein as a “CAR-expressing cell”) is a cell or population of cells as described herein, e.g., a human immune effector cell or population of cells (e.g., a human T cell or a human NK cell, e.g., a human T cell described herein or a human NK cell described herein). In one embodiment, the human T cell is a CD8+ T cell. In one embodiment, the cell is an autologous T cell. In one embodiment, the cell is an allogeneic T cell. In one embodiment, the cell is a T cell and the T cell is diaglycerol kinase (DGK) deficient. In one embodiment, the cell is a T cell and the T cell is Ikaros deficient. In one embodiment, the cell is a T cell and the T cell is both DGK and Ikaros deficient. It shall be understood that the compositions and methods disclosed herein reciting the term “cell” encompass compositions and methods comprising one or more cells, e.g., a population of cells.

[0063] In some embodiments, the CAR-expressing cell that is administered comprises a regulatable CAR (RCAR), e.g., an RCAR as described herein. The RCAR may comprise, e.g., an intracellular signaling member comprising an intracellular signaling domain and a first switch domain, an antigen binding member comprising an antigen binding domain that binds an antigen (e.g., antigen described herein, e.g., B cell antigen, e.g., CD123 or CD19) and a second switch domain; and a transmembrane domain. The method may further comprise administering a dimerization molecule, e.g., in an amount sufficient to cause dimerization of the first switch and second switch domains.

### Inhibitors

[0064] In embodiments, the JAK-STAT inhibitor comprises/is an antibody molecule, a small molecule, a polypeptide, e.g., a fusion protein, or an inhibitory nucleic acid, e.g., a siRNA or shRNA. In embodiments, the JAK-STAT inhibitor is a small molecule, e.g., ruxolitinib, AG490, AZD1480, tofacitinib (tasocitinib or CP-690550), CYT387, fedratinib, baricitinib (INCB039110), lestaurtinib (CEP701), pacritinib (SB1518), XL019, gandotinib (LY2784544), BMS911543, fedratinib (SAR302503), decemotinib (V-509), INCB39110, GEN1, GEN2, GLPG0634, NS018, and N-(cyanomethyl)-4-[2-(4-morpholinoanilino)pyrimidin-4-yl]benzamide, or pharmaceutically acceptable salts thereof. In embodiments, the JAK-STAT inhibitor is ruxolitinib or a pharmaceutically acceptable salt thereof.

[0065] In embodiments, the BTK inhibitor comprises/is an antibody molecule, a small molecule, a polypeptide, e.g., a fusion protein, or an inhibitory nucleic acid, e.g., a siRNA or shRNA. In embodiments, the BTK inhibitor is a small molecule, e.g., ibrutinib, GDC-0834, RN-486, CGI-560, CGI-1764, HM-71224, CC-292, ONO-4059, CNX-774, or LFM-A13, or a pharmaceutically acceptable salt thereof, or a combination thereof. In embodiments, the BTK inhibitor is ibrutinib or a pharmaceutically acceptable salt thereof.

[0066] In embodiments, an IL-6 inhibitor, e.g., used in accordance with any composition or method described herein, comprises an inhibitor of IL-6 signaling, e.g., comprising an IL-6 inhibitor or an IL-6 receptor (IL-6R) inhibitor. Exemplary IL-6 inhibitors include tocilizumab, siltuximab, bazedoxifene, and soluble glycoprotein 130 (sgp130) blockers. Exemplary IL-6 inhibitors are described in International Application WO2014011984, which is hereby incorporated by reference. Tocilizumab is described in greater detail herein, e.g., in the “CRS Therapies” section herein. In one embodiment, the IL-6 inhibitor is an anti-IL-6 antibody, e.g., an anti-IL-6 chimeric monoclonal antibody such as siltuximab. In other embodiments, the inhibitor comprises a soluble gp130 or a fragment thereof that is capable of blocking IL-6 signalling. In some embodiments, the sgp130 or fragment thereof is fused to a heterologous domain, e.g., an Fc domain, e.g., is a gp130-Fc fusion protein such as FE301. In embodiments, the IL-6 inhibitor comprises an antibody, e.g., an antibody to the IL-6 receptor, such as sarilumab, olokizumab (CDP6038), elsilimomab, sirukumab (CNTO 136), ALD518/BMS-945429, ARGX-109, or FM101. In some embodiments, the IL-6 inhibitor comprises a small molecule such as CPSI-2364.

### Diseases

[0067] In embodiments, the disease associated with expression of an antigen is a hyperproliferative disorder, e.g., cancer. In embodiments, the cancer is a solid cancer. In other embodiments, the cancer is a hematological cancer.

[0068] In embodiments, the hematological cancer is a leukemia. In embodiments, the hematological cancer is acute myeloid leukemia (AML), acute lymphocytic leukemia (ALL), or chronic lymphocytic leukemia (CLL). In embodiments, the hematological cancer is a lymphoma, e.g., mantle cell lymphoma (MCL).

[0069] In embodiments, the hematological cancer is a B cell malignancy, e.g., B cell leukemia or B cell lymphoma.

[0070] In embodiments, the hematological cancer is chosen from: chronic lymphocytic leukemia (CLL), mantle cell lymphoma (MCL), multiple myeloma, acute lymphoid leukemia (ALL), Hodgkin lymphoma, B-cell acute lymphoid leukemia (BALL), T-cell acute lymphoid leukemia (TALL), small lymphocytic leukemia (SLL), B cell prolymphocytic leukemia, blastic plasmacytoid dendritic cell neoplasm, Burkitt's lymphoma, diffuse large B cell lymphoma (DLBCL), DLBCL associated with chronic inflammation, follicular lymphoma, pediatric follicular lymphoma, hairy cell leukemia, small cell- or a large cell-follicular lymphoma, malignant lymphoproliferative conditions, MALT lymphoma (extranodal marginal zone lymphoma of mucosa-associated lymphoid tissue), Marginal zone lymphoma, myelodysplasia and myelodysplastic syndrome, non-Hodgkin lymphoma, plasmablastic lymphoma, plasmacytoid dendritic cell neoplasm, Waldenstrom macroglobulinemia, splenic marginal zone lymphoma, splenic lymphoma/leukemia, splenic diffuse red pulp small B-cell lymphoma, hairy cell leukemia-variant, lymphoplasmacytic lymphoma, a heavy chain disease, plasma cell myeloma, solitary plasmocytoma of bone, extraosseous plasmocytoma, nodal marginal zone lymphoma, pediatric nodal marginal zone lymphoma, primary cutaneous follicle center lymphoma, lymphomatoid granulomatosis, primary mediastinal (thymic) large B-cell lymphoma, intravascular large B-cell lymphoma, ALK+ large B-cell lymphoma, large B-cell lymphoma arising in HHV8-associated multicentric Castleman disease, primary effusion lymphoma, B-cell lymphoma, or unclassifiable lymphoma.

[0071] In embodiments, the hematological cancer is chosen from: acute myeloid leukemia (AML), acute lymphoblastic leukemia (ALL), acute lymphoblastic B-cell leukemia (B-cell acute lymphoid leukemia, BALL), acute lymphoblastic T-cell leukemia (T-cell acute lymphoid leukemia (TALL), B-cell prolymphocytic leukemia, chronic lymphocytic leukemia, chronic myeloid leukemia (CML), hairy cell leukemia, Hodgkin lymphoma, a histiocytic disorder, a mast cell disorder, a myelodysplasia, a myelodysplastic syndrome, a myeloproliferative neoplasm, a plasma cell myeloma, a plasmacytoid dendritic cell neoplasm, or a combination thereof.

[0072] In embodiments, the disease is a disease associated with expression of a B-cell antigen (e.g., expression of one or more of CD10, CD19, CD20, CD22, CD34, CD123, FLT-3, ROR1, CD79b, CD179b, and/or CD79a). In embodiments the disease associated with expression of a B-cell antigen is selected from a proliferative disease such as a cancer, a malignancy, or a precancerous condition such as a myelodysplasia, a myelodysplastic syndrome or a preleukemia, or is a non-cancer related indication associated with expression of the B-cell antigen, e.g., one or more of CD10, CD19, CD20, CD22, CD34, CD123, FLT-3, ROR1, CD79b, CD179b, and/or CD79a. In certain embodiments, the disease associated with B-cell antigen expression is a “preleukemia” which is a diverse collection of hematological conditions united by ineffective production (or dysplasia) of myeloid blood cells. In some embodiments, the disease associated with B-cell antigen expression includes, but is not limited to atypical and/or non-classical cancers, malignancies, precancerous conditions or proliferative diseases expressing the B-cell antigen (e.g., one or more of CD10, CD19, CD20, CD22, CD34, CD123, FLT-3, ROR1, CD79b, CD179b, and/or CD79a). In embodiments, the disease associated with expression of a B-cell antigen is a hematological cancer, leukemia, lymphoma, MCL, CLL, ALL, Hodgkin lymphoma, or multiple myeloma. Any combination of the diseases associated with B-cell antigen expression described herein can be treated with the methods and compositions described herein.

### CRS

[0073] In embodiments, the CRS is a severe CRS, e.g., grade 4 or 5 CRS. In embodiments, the CRS is a less than severe CRS, e.g., grade 1, 2, or 3 CRS. Additional description of CRS is provided in the section entitled “Cytokine Release Syndrome.”

[0074] In embodiments of any method described herein, the CRS is a CRS distinguished from sepsis, e.g., by a method described herein, e.g., by a method of distinguishing between CRS and sepsis in a subject as described herein. In embodiments, the method of distinguishing between CRS and sepsis comprises acquiring a measure of one or more of the following:

[0075] (i) the level or activity of one or more of (e.g., 2, 3, 4, 5, 6, 7, 8, 9, 10, 11, 12, 13, 14, 15, or all of) GM-CSF, HGF, IFN-γ, IFN-α, IL-10, IL-15, IL-5, IL-6, IL-8, IP-10, MCP1, MIG, MIP-1β, sIL-2Rα, sTNFRI, and sTNFRII, wherein a level or activity that is higher than a reference is indicative of CRS; or

[0076] (ii) the level or activity of one or more of (e.g., 2, 3, 4, 5, 6, or all of) CD163, IL-1β, sCD30, sIL-4R, sRAGE, sVEGFR-1, and sVEGFR-2, wherein a level or activity that is higher than a reference is indicative of sepsis. Additional embodiments of a method of distinguishing between CRS and sepsis in a subject are described herein.

### Dosing Regimens

[0077] In some embodiments, the CAR-expressing cell and the inhibitor (e.g., JAK-STAT or BTK inhibitor) are administered sequentially, concurrently, or within a treatment interval, e.g., as described herein.

[0078] In one embodiment, the CAR-expressing cell and the inhibitor (e.g., JAK-STAT or BTK inhibitor) are administered sequentially. In one embodiment, the inhibitor (e.g., JAK-STAT or BTK inhibitor) is administered prior to administration of the CAR-expressing cell. In one embodiment, the inhibitor (e.g., JAK-STAT or BTK inhibitor) is administered after the administration of the CAR-expressing cell.

[0079] In one embodiment, the inhibitor (e.g., JAK-STAT or BTK inhibitor) and CAR-expressing cell are administered simultaneously or concurrently.

[0080] In embodiments, the CAR-expressing cell and the inhibitor (e.g., JAK-STAT or BTK inhibitor) are administered in a treatment interval. In one embodiment, the treatment interval comprises a single dose of the inhibitor (e.g., JAK-STAT or BTK inhibitor) and a single dose of the CAR-expressing cell (e.g., in any order). In another embodiment, the treatment interval comprises multiple doses (e.g., a first and second dose) of the inhibitor (e.g., JAK-STAT or BTK inhibitor) and a dose of the CAR-expressing cell (e.g., in any order).

[0081] Where the treatment interval comprises a single dose of the inhibitor (e.g., JAK-STAT or BTK inhibitor) and a single dose of the CAR-expressing cell, in certain embodiments, the dose of inhibitor (e.g., JAK-STAT or BTK inhibitor) and the dose of the CAR-expressing cell are administered simultaneously or concurrently. For example, the dose of the inhibitor (e.g., JAK-STAT or BTK inhibitor) and the dose of the CAR-expressing cell are administered within 2 days (e.g., within 2 days, 1 day, 24 hours, 12 hours, 6 hours, 4 hours, 2 hours, 1 hour, or less) of each other. In embodiments, the treatment interval is initiated upon administration of the first-administered dose and completed upon administration of the later-administered dose.

[0082] Where the treatment interval comprises a single dose of the inhibitor (e.g., JAK-STAT or BTK inhibitor) and a single dose of the CAR-expressing cell, in certain embodiments, the dose of the inhibitor (e.g., JAK-STAT or BTK inhibitor) and the dose of the CAR-expressing cell are administered sequentially. In embodiments, the dose of the CAR-expressing cell is administered prior to the dose of the inhibitor (e.g., JAK-STAT or BTK inhibitor), and the treatment interval is initiated upon administration of the dose of the CAR-expressing cell and completed upon administration of the dose of the inhibitor (e.g., JAK-STAT or BTK inhibitor). In other embodiments, the dose of the inhibitor (e.g., JAK-STAT or BTK inhibitor) is administered prior to the dose of the CAR-expressing cell, and the treatment interval is initiated upon administration of the dose of the inhibitor (e.g., JAK-STAT or BTK inhibitor) and completed upon administration of the dose of the CAR-expressing cell. In one embodiment, the treatment interval further comprises one or more, e.g., 1, 2, 3, 4, 5, 6, 7, 8, 9, 10, 11, 12, 13, 14, 15, 16, 17, 18, 19, 20, or more, subsequent doses of the inhibitor (e.g., JAK-STAT or BTK inhibitor). In such embodiments, the treatment interval comprises two, three, four, five, six, seven, eight, nine, ten, or more, doses of inhibitor (e.g., JAK-STAT or BTK inhibitor) and one dose of the CAR-expressing cell. In one embodiment, the dose of the CAR-expressing cell is administered at least 1 day, 2 days, 3 days, 4 days, 5 days, 6 days, 7 days, or 2 weeks before or after a dose of inhibitor (e.g., JAK-STAT or BTK inhibitor) is administered. In embodiments where more than one dose of inhibitor (e.g., JAK-STAT or BTK inhibitor) is administered, the dose of the CAR-expressing cell is administered at least 1 day, 2 days, 3 days, 4 days, 5, days, 6 days, 7 days, or 2 weeks before or after the first dose of inhibitor (e.g., JAK-STAT or BTK inhibitor) is administered or after the initiation of the treatment interval. In embodiments, where more than one dose of inhibitor (e.g., JAK-STAT or BTK inhibitor) is administered, the second inhibitor (e.g., JAK-STAT or BTK inhibitor) dose is administered about 10 h, 12 h, 14 h, 16 h, 18 h, 20 h, 24 h, 1 day, 1.5 days, 2 days, 3 days, or 4 days after the first dose of inhibitor (e.g., JAK-STAT or BTK inhibitor) is administered.

[0083] Where the treatment interval comprises multiple doses (e.g., a first and second, and optionally a subsequent dose) of an inhibitor (e.g., JAK-STAT or BTK inhibitor) and a dose of a CAR-expressing cell, in certain embodiments, the dose of the CAR-expressing cell and the first dose of the inhibitor (e.g., JAK-STAT or BTK inhibitor) are administered simultaneously or concurrently, e.g., within 2 days (e.g., within 2 days, 1 day, 24 hours, 12 hours, 6 hours, 4 hours, 2 hours, or less) of each other. In embodiments, the second dose of the inhibitor (e.g., JAK-STAT or BTK inhibitor) is administered after either (i) the dose of the CAR-expressing cell or (ii) the first dose of the inhibitor (e.g., JAK-STAT or BTK inhibitor), whichever is later. In embodiments, the second dose of the inhibitor (e.g., JAK-STAT or BTK inhibitor) is administered at least 8 h (e.g., at least 8 h, 9 h, 10 h, 12 h, 14 h, 16 h, 18 h, 20 h, 24 h, 1 day, 1.5 days, 2 days, 3 days, 4 days, 5 days, 6 days, 7 days, 1 week, 2 weeks, 3 weeks, 4 weeks, 5 weeks, or more) after (i) or (ii). In embodiments, a subsequent dose (e.g., third, fourth, or fifth dose, and so on) of the inhibitor (e.g., JAK-STAT or BTK inhibitor) is administered after the second dose of the inhibitor (e.g., JAK-STAT or BTK inhibitor). In embodiments, the subsequent dose of the inhibitor (e.g., JAK-STAT or BTK inhibitor) is administered at least 8 h (e.g., at least 8 h, 9 h, 10 h, 12 h, 14 h, 16 h, 18 h, 20 h, 24 h, 1 day, 1.5 days, 2 days, 3 days, 4 days, 5 days, 6 days, 7 days, 1 week, 2 weeks, 3 weeks, 4 weeks, 5 weeks, or more) after the second dose of the inhibitor (e.g., JAK-STAT or BTK inhibitor). In such embodiments, the treatment interval is initiated upon administration of the first-administered dose and completed upon administration of the second dose (or subsequent dose) of the inhibitor (e.g., JAK-STAT or BTK inhibitor). In embodiments, the dose of inhibitor (e.g., JAK-STAT or BTK inhibitor) is administered once a day (QD) or twice a day (BID) for a treatment interval of at least 7 days, 8 days, 9 days, 10 days, 1 week, 2 weeks, 3 weeks, 4 weeks, 5 weeks, 6 weeks, 1 month, 2 months, 3 months, 4 months, 5 months, 6 months, 7 months, 8 months, or more. Any of the treatment intervals described herein can include one or more doses of the CAR-expressing cells.

[0084] In other embodiments where the treatment interval comprises multiple doses (e.g., a first and second, and optionally a subsequent dose) of an inhibitor (e.g., JAK-STAT or BTK inhibitor) and a dose of a CAR-expressing cell, the dose of the CAR-expressing cell and the first dose of the inhibitor (e.g., JAK-STAT or BTK inhibitor) are administered sequentially. In embodiments, the dose of the CAR-expressing cell is administered after administration of the first dose of the inhibitor (e.g., JAK-STAT or BTK inhibitor) but before the administration of the second dose of the inhibitor (e.g., JAK-STAT or BTK inhibitor). In embodiments, a subsequent dose (e.g., third, fourth, or fifth dose, and so on) of the inhibitor (e.g., JAK-STAT or BTK inhibitor) is administered after the second dose of the inhibitor (e.g., JAK-STAT or BTK inhibitor). In such embodiments, the treatment interval is initiated upon administration of the first dose of the inhibitor (e.g., JAK-STAT or BTK inhibitor) and completed upon administration of the second, third, fourth, fifth, or sixth dose (or subsequent dose) of the inhibitor (e.g., JAK-STAT or BTK inhibitor). In one embodiment, the second dose of the inhibitor (e.g., JAK-STAT or BTK inhibitor) is administered at least 8 h (e.g., at least 8 h, 9 h, 10 h, 12 h, 14 h, 16 h, 18 h, 20 h, 24 h, 1 day, 1.5 days, 2 days, 3 days, 4 days, 5 days, 6 days, 7 days, 1 week, 2 weeks, 3 weeks, 4 weeks, 5 weeks, or more) after administration of the first dose of the inhibitor (e.g., JAK-STAT or BTK inhibitor). In one embodiment, the subsequent dose (e.g., third, fourth, or fifth dose, and so on) of the inhibitor (e.g., JAK-STAT or BTK inhibitor) is administered at least 8 h (e.g., at least 8 h, 9 h, 10 h, 12 h, 14 h, 16 h, 18 h, 20 h, 24 h, 1 day, 1.5 days, 2 days, 3 days, 4 days, 5 days, 6 days, 7 days, 1 week, 2 weeks, 3 weeks, 4 weeks, 5 weeks, or more) after the second dose of the inhibitor (e.g., JAK-STAT or BTK inhibitor). In one embodiment, the dose of the CAR-expressing cell is administered at least 1 day (e.g., at least 1 day, 2 days, 3 days, 4 days, 5 days, 6 days, 7 days, 1 week, 2 weeks, 3 weeks, 4 weeks, 5 weeks, 6 weeks, 1 month, 2 months, 3 months, 4 months, 5 months, 6 months, or more) after administration of the first dose of the inhibitor (e.g., JAK-STAT or BTK inhibitor). In one embodiment, the second dose of the inhibitor (e.g., JAK-STAT or BTK inhibitor) is administered within 1 day (e.g., within 24 h, 20 h, 18 h, 16 h, 14 h, 12 h, 10 h, 8 h, 6 h, or less) of the administration of the dose of the CAR-expressing cell. In embodiments, the second dose of the inhibitor (e.g., JAK-STAT or BTK inhibitor) is administered concurrently with the dose of the CAR-expressing cell. In one embodiment, the second dose of the inhibitor (e.g., JAK-STAT or BTK inhibitor) is administered at least 1 day (e.g., at least 1 day, 2 days, 3 days, 4 days, 5 days, 6 days, 7 days, 1 week, 2 weeks, 3 weeks, 4 weeks, 5 weeks, or more) after administration of the dose of the CAR-expressing cell. In embodiments, the treatment interval comprises continuous dosing of the inhibitor (e.g., JAK-STAT or BTK inhibitor), e.g., once a day, twice a day, three times a day, every 2 days, every 3 days, or every 4 days. In embodiments where the inhibitor is dosed continuously, the dose (e.g., first dose) of the CAR-expressing cell is administered after the first dose of the inhibitor, e.g., at least 1 day after, e.g., at least 1, 2, 3, 4, 5, 6, 7 days, 1, 2, 3, 4, 5, 6 weeks, 1, 2, 3, 4, 5, 6 months or more after. In other embodiments where the inhibitor is dosed continuously, the dose (e.g., first dose) of the CAR-expressing cell is administered concurrently with (e.g., within 1 day (e.g., within 24 h, 20 h, 18 h, 16 h, 14 h, 12 h, 10 h, 8 h, 6 h, or less, or) the administration of the first dose of the inhibitor. In embodiments where the inhibitor is dosed continuously, the inhibitor is dosed for at least 1 day after, e.g., at least 1, 2, 3, 4, 5, 6, 7 days, 1, 2, 3, 4, 5, 6 weeks, 1, 2, 3, 4, 5, 6 months or more after, the administration of the first dose of the CAR-expressing cell. In other embodiments, the dose of the CAR-expressing cell is administered before administration of the first dose of the inhibitor (e.g., JAK-STAT or BTK inhibitor). In such embodiments, the treatment interval is initiated upon administration of the CAR-expressing cell and completed upon administration of the second dose (or subsequent dose) of the inhibitor (e.g., JAK-STAT or BTK inhibitor). In embodiments, the second dose of the inhibitor (e.g., JAK-STAT or BTK inhibitor) is administered at least 8 h (e.g., at least 8 h, 9 h, 10 h, 12 h, 14 h, 16 h, 18 h, 20 h, 24 h, 1 day, 1.5 days, 2 days, 3 days, 4 days, 5 days, 6 days, 7 days, 1 week, 2 weeks, 3 weeks, 4 weeks, 5 weeks, or more) after administration of the first dose of the inhibitor (e.g., JAK-STAT or BTK inhibitor). In embodiments, the subsequent dose (e.g., third, fourth, or fifth dose, and so on) of the inhibitor (e.g., JAK-STAT or BTK inhibitor) is administered at least 8 h (e.g., at least 8 h, 9 h, 10 h, 12 h, 14 h, 16 h, 18 h, 20 h, 24 h, 1 day, 1.5 days, 2 days, 3 days, 4 days, 5 days, 6 days, 7 days, 1 week, 2 weeks, 3 weeks, 4 weeks, 5 weeks, or more) after the second dose of the inhibitor (e.g., JAK-STAT or BTK inhibitor). In embodiments, the first dose of the inhibitor (e.g., JAK-STAT or BTK inhibitor) is administered at least 1 day (e.g., at least 1 day, 2 days, 3 days, 4 days, 5 days, 6 days, 7 days, 1 week, 2 weeks, 3 weeks, 4 weeks, 5 weeks, or more) after administration of the CAR-expressing cell. In embodiments, the dose of inhibitor (e.g., JAK-STAT or BTK inhibitor) is administered once a day (QD) or twice a day (BID) for a treatment interval of at least 7 days, 8 days, 9 days, 10 days, 1 week, 2 weeks, 3 weeks, 4 weeks, 5 weeks, 6 weeks, 1 month, 2 months, 3 months, 4 months, 5 months, 6 months, 7 months, 8 months, or more.

[0085] In one embodiment, any of the treatment intervals described herein can be repeated one or more times, e.g., 1, 2, 3, 4, or 5 more times. In one embodiment, the treatment interval is repeated once, resulting in a treatment regimen comprising two treatment intervals. In an embodiment, the repeated treatment interval is administered at least 1 day, e.g., 1 day, 2 days, 3 days, 4 days, 5 days, 6 days, 7 days, or 2 weeks, or more after the completion of the first or previous treatment interval. In an embodiment, the repeated treatment interval is administered at least 3 days after the completion of the first or previous treatment interval.

[0086] In one embodiment, any of the treatment intervals described herein can be followed by one or more, e.g., 1, 2, 3, 4, or 5, subsequent treatment intervals. The one or more subsequent treatment interval is different from the first or previous treatment interval. By way of example, a first treatment interval consisting of a single dose of an inhibitor (e.g., JAK-STAT or BTK inhibitor) and a single dose of a CAR-expressing cell is followed by a second treatment interval consisting of multiple doses (e.g., two, three, four, or more doses) of an inhibitor (e.g., JAK-STAT or BTK inhibitor) and a single dose of a CAR-expressing cell. In one embodiment, the one or more subsequent treatment intervals is administered at least 1 day, e.g., 1 day, 2 days, 3 days, 4 days, 5 days, 6 days, 7 days, or 2 weeks, after the completion of the first or previous treatment interval.

[0087] In any of the methods described herein, one or more subsequent doses, e.g., 1, 2, 3, 4, 5, 6, 7, 8, 9, 10, more doses, of the inhibitor (e.g., JAK-STAT or BTK inhibitor) is administered after the completion of one or more treatment intervals. In embodiments where the treatment intervals are repeated or two or more treatment intervals are administered, one or more subsequent doses, e.g., 1, 2, 3, 4, 5, 6, 7, 8, 9, 10, more doses, of the inhibitor (e.g., JAK-STAT or BTK inhibitor) is administered after the completion of one treatment interval and before the initiation of another treatment interval. In one embodiment, a dose of the inhibitor (e.g., JAK-STAT or BTK inhibitor) is administered every 8 h, 10 h, 12 h, 14 h, 16 h, 20 h, 24 h, 1 day, 1.5 days, 2 days 3 days, 4 days, 5 days, 7 days, 2 weeks, 3 weeks, or 4 weeks after the completion of one or more, or each, treatment intervals. In one embodiment, one, two, or three doses of the inhibitor (e.g., JAK-STAT or BTK inhibitor) is administered each day after the completion of one or more, or each, treatment intervals.

[0088] In any of the methods described herein, one or more, e.g., 1, 2, 3, 4, 5, or more, subsequent doses of the CAR-expressing cell are administered after the completion of one or more treatment intervals. In embodiments where the treatment intervals are repeated or two or more treatment intervals are administered, one or more subsequent doses, e.g., 1, 2, 3, 4, or 5, or more doses, of the CAR-expressing cell is administered after the completion of one treatment interval and before the initiation of another treatment interval. In one embodiment, a dose of the CAR-expressing cell is administered every 2 days, 3 days, 4 days, 5 days, 7 days, 2 weeks, 3 weeks, or 4 weeks after the completion of one or more, or each, treatment intervals.

[0089] In one embodiment, the treatment interval comprises a single dose of a CAR-expressing cell (e.g., a CD123 CAR-expressing cell or CD19 CAR-expressing cell) that is administered concurrently with (e.g., within 2 days (e.g., within 2 days, 1 day, 24 hours, 12 hours, 6 hours, 4 hours, 2 hours, or less, of) a first dose of an inhibitor (e.g., JAK-STAT inhibitor, e.g., ruxolitinib; or BTK inhibitor, e.g., ibrutinib). In embodiments, the JAK-STAT inhibitor (e.g., ruxolitinib) or the BTK inhibitor (e.g., ibrutinib) is administered twice a day (BID) during the duration of the treatment interval. In embodiments, the JAK-STAT inhibitor (e.g., ruxolitinib) or the BTK inhibitor (e.g., ibrutinib) is administered once a day (QD) during the duration of the treatment interval.

[0090] In other embodiments, the treatment interval comprises a single dose of a CAR-expressing cell (e.g., a CD123 CAR-expressing cell or CD19 CAR-expressing cell) that is administered after (e.g., 1 day, 2 days, 3 days, 4 days, 5 days, 6 days, 7 days, 1 week, 2 weeks, 3 weeks, 4 weeks, or more after) administration of a first dose of an inhibitor (e.g., JAK-STAT inhibitor, e.g., ruxolitinib; or BTK inhibitor, e.g., ibrutinib). In embodiments, a second dose of the inhibitor (e.g., JAK-STAT inhibitor, e.g., ruxolitinib; or BTK inhibitor, e.g., ibrutinib) is administered after administration of the first dose of the inhibitor (e.g., JAK-STAT inhibitor, e.g., ruxolitinib; or BTK inhibitor, e.g., ibrutinib). In embodiments, a subsequent dose of the inhibitor (e.g., JAK-STAT inhibitor, e.g., ruxolitinib; or BTK inhibitor, e.g., ibrutinib) is administered. In embodiments, the doses of the inhibitor (e.g., JAK-STAT inhibitor, e.g., ruxolitinib; or BTK inhibitor, e.g., ibrutinib) are administered twice a day (BID). In embodiments, the doses of the inhibitor (e.g., JAK-STAT inhibitor, e.g., ruxolitinib; or BTK inhibitor, e.g., ibrutinib) are administered once a day (QD). In embodiments, the treatment interval comprises at least 5 (e.g., at least 5, 6, 7, 8, 9, 10, 12, 14, 16, 18, 20, or more) doses of the inhibitor (e.g., JAK-STAT inhibitor, e.g., ruxolitinib; or BTK inhibitor, e.g., ibrutinib). In embodiments, the treatment interval comprises continuous dosing of the inhibitor (e.g., QD or BID). In embodiments, the treatment interval is for a duration of 1-7 days, 1-5 weeks, or 1-12 months.

[0091] In any of the methods described herein, the subject is administered a single dose of a CAR-expressing cell and a single dose of an inhibitor (e.g., JAK-STAT inhibitor, e.g., ruxolitinib; or BTK inhibitor, e.g., ibrutinib). In one embodiment, the single dose of the CAR-expressing cell is administered at least 1 day, e.g., 1, 2, 3, 4, 5, 6, 7, 8, 9, 10, 14, 20, 25, 30, 35, 40 days, or 2 weeks, 3 weeks, 4 weeks, or more, after administration of the single dose of the inhibitor (e.g., JAK-STAT inhibitor, e.g., ruxolitinib; or BTK inhibitor, e.g., ibrutinib).

[0092] In one embodiment, one or more, e.g., 1, 2, 3, 4, or 5, subsequent doses of a CAR-expressing cell are administered to the subject after the initial dose of the CAR-expressing cell. In one embodiment, the one or more subsequent doses of the CAR-expressing cell are administered at least 2 days, e.g., 2, 3, 4, 5, 6, 7, 8, 9, 10, 14, 20, 25, 30, 35, 40 days, or 2 weeks, 3 weeks, 4 weeks, or more, after the previous dose of the CAR-expressing cell. In one embodiment, the one or more subsequent doses of the CAR-expressing cell are administered at least 5 days after the previous dose of the CAR-expressing cell. In one embodiment, the subject is administered three doses of the CAR-expressing cell per week or one dose every 2 days.

[0093] In one embodiment, one or more, e.g., 1, 2, 3, 4, 5, 6, 7, 8, 9, 10, or more, subsequent doses of the inhibitor (e.g., JAK-STAT inhibitor, e.g., ruxolitinib; or BTK inhibitor, e.g., ibrutinib) are administered after administration of the single dose of the inhibitor (e.g., JAK-STAT inhibitor, e.g., ruxolitinib; or BTK inhibitor, e.g., ibrutinib). In one embodiment, the one or more subsequent doses of the inhibitor (e.g., JAK-STAT inhibitor, e.g., ruxolitinib; or BTK inhibitor, e.g., ibrutinib) are administered at least 5 days, 7 days, 10 days, 14 days, 20 days, 25 days, 30 days, 2 weeks, 3 weeks, 4 weeks, or 5 weeks, after the previous dose of inhibitor (e.g., JAK-STAT inhibitor, e.g., ruxolitinib; or BTK inhibitor, e.g., ibrutinib). In other embodiments, the one or more subsequent doses of the inhibitor (e.g., JAK-STAT inhibitor, e.g., ruxolitinib; or BTK inhibitor, e.g., ibrutinib) are administered every other day, once a day, or twice a day, after the previous dose of inhibitor (e.g., JAK-STAT inhibitor, e.g., ruxolitinib; or BTK inhibitor, e.g., ibrutinib).

[0094] In one embodiment, the one or more subsequent doses of the inhibitor (e.g., JAK-STAT inhibitor, e.g., ruxolitinib; or BTK inhibitor, e.g., ibrutinib) are administered at least 1, 2, 3, 4, 5, 6, or 7 days, after a dose of the CAR-expressing cell, e.g., the initial dose of the CAR-expressing cell.

[0095] In one embodiment, one or more, e.g., 1, 2, 3, 4, or 5, doses of the inhibitor (e.g., JAK-STAT inhibitor, e.g., ruxolitinib; or BTK inhibitor, e.g., ibrutinib) is administered prior to the first dose of the CAR-expressing cell.

[0096] In one embodiment, the administration of the one or more doses of the CAR-expressing cell and the one or more doses of inhibitor (e.g., JAK-STAT inhibitor, e.g., ruxolitinib; or BTK inhibitor, e.g., ibrutinib) is repeated, e.g., 1, 2, 3, 4, or 5 more times.

[0097] Dosages and therapeutic regimens of the therapeutic agents disclosed herein can be determined by a skilled artisan.

[0098] In any of the administration regimens or treatment intervals described herein, in some embodiments, a dose of CAR-expressing cells (e.g., CD19 CAR-expressing or CD123 CAR-expressing cells) comprises at least about 1×10⁵, 5×10⁶, 1×10⁷, 1.5×10⁷, 2×10⁷, 2.5×10⁷, 3×10⁷, 3.5×10⁷, 4×10⁷, 5×10⁷, 1×10⁸, 1.5×10⁸, 2×10⁸, 2.5×10⁸, 3×10⁸, 3.5×10⁸, 4×10⁸, 5×10⁸, 1×10⁹, 2×10⁹, or 5×10⁹ cells. In some embodiments, a dose of CAR-expressing cells comprises at least about 1-5×10⁷ to 1-5×10⁸. In some embodiments, the subject is administered about 1-5×10⁷ CAR-expressing cells. In other embodiments, the subject is administered about 1-5×10⁸ CAR-expressing cells.

[0099] In embodiments, the CAR-expressing cell is administered at a dose (e.g., total dose) of 1.5×10⁷ to 5×10⁹ cells per kg (e.g., 0.3×10⁶ to 1×10⁸ cells per kg). In embodiments, the total dose does not exceed 1.5×10¹⁰ cells/kg, e.g., administered over time in multiple doses, e.g., does not exceed 1.5×10⁹ cells/kg, e.g., does not exceed 1.5×10⁸ cells/kg.

[0100] In one embodiment, up to 10, 9, 8, 7, 6, 5, 4, 3, or 2 doses of cells are administered. In other embodiments, one, two, three, four, five or 6 doses of the cells are administered to the mammal, e.g., in a treatment interval of one, two, three, four or more weeks. In one embodiment, up to 6 doses are administered in two weeks. The doses may the same or different. In one embodiment, a lower dose is administered initially, followed by one or more higher doses. In one exemplary embodiment, the lower dose is about 1×10⁵ to 1×10⁹ cells/kg, or 1×10⁶ to 1×10⁸ cells/kg; and the higher dose is about 2×10⁵ to 2×10⁹ cells/kg or 2×10⁶ to 2×10⁸ cells/kg, followed by 3-6 doses of about 4×10⁵ to 4×10⁹ cells/kg, or 4×10⁶ to 4×10⁸ cells/kg.

[0101] In embodiments, the CAR-expressing cells are administered to the subject according to a dosing regimen comprising a total dose of cells administered to the subject by dose fractionation, e.g., one, two, three or more separate administration of a partial dose. In embodiments, a first percentage of the total dose is administered on a first day of treatment, a second percentage of the total dose is administered on a subsequent (e.g., second, third, fourth, fifth, sixth, or seventh or later) day of treatment, and optionally, a third percentage (e.g., the remaining percentage) of the total dose is administered on a yet subsequent (e.g., third, fourth, fifth, sixth, seventh, eighth, ninth, tenth, or later) day of treatment. For example, 10% of the total dose of cells is delivered on the first day, 30% of the total dose of cells is delivered on the second day, and the remaining 60% of the total dose of cells is delivered on the third day of treatment. For example, a total cell dose includes 1 to 5×10⁷ or 1 to 5×10⁸ CAR-expressing cells.

[0102] In embodiments, the total dose is administered over multiple doses (e.g., a first dose, a second dose, and optionally a third dose, and so on).

[0103] In embodiments, the first dose comprises about 10% of the total dose (e.g., about 1×10⁷ cells/kg), e.g., administered on a first day. In embodiments, the second dose comprises about 30% of the total dose (e.g., about 3×10⁷ cells/kg), e.g., administered on a subsequent days (e.g., 1, 2, 3, 4, 5, 6, or 7 days after the first dose). In embodiments, the second dose is administered if the subject is clinically stable after the first dose. In embodiments, a subsequent dose (e.g., third, optionally fourth, etc. dose) is administered to the subject, e.g., where the sum of the first dose, second dose, and subsequent dose add up to the total dose. In embodiments, where the total dose is administered over multiple doses, the time between each dose is at least 1 day (e.g., at least 1, 2, 3, 4, 5, 6, 7 days, 1, 2, or 3 weeks, or more). In embodiments, the time between the second dose and the third dose, and/or between the third dose and the fourth dose, and/or between the fourth dose and the fifth dose, is at least 1 week (e.g., at least 1, 2, 3, 4 weeks, or more).

[0104] In embodiments, in any of the administration regimens described herein, the dose of the inhibitor (e.g., JAK-STAT inhibitor or BTK inhibitor) is administered every 1, 2, 3, 4, 5, 6, or 7 days, or twice a day, or three times a day.

[0105] In embodiments, a JAK-STAT inhibitor, e.g., ruxolitinib, is administered (e.g., orally) at a dose of 2.5 mg to 50 mg (e.g., 2.5-5 mg, 5-10 mg, 10-15 mg, 15-20 mg, 20-25 mg, 25-30 mg, 30-35 mg, 35-40 mg, 40-45 mg, or 45-50 mg) twice daily (e.g., 5 mg to 100 mg total per day).

[0106] In embodiments, a BTK inhibitor, e.g., ibrutinib (PCI-32765), is administered (e.g., orally) at a dose of about 250 mg, 300 mg, 350 mg, 400 mg, 420 mg, 440 mg, 460 mg, 480 mg, 500 mg, 520 mg, 540 mg, 560 mg, 580 mg, 600 mg (e.g., 250 mg, 420 mg or 560 mg) daily for a period of time, e.g., daily for 21 day cycle, or daily for 28 day cycle. In one embodiment, 1, 2, 3, 4, 5, 6, 7, 8, 9, 10, 11, 12 or more cycles of the BTK inhibitor, e.g., ibrutinib, are administered.

[0107] In some embodiments of any of the methods disclosed herein, the method comprises administering the inhibitor (e.g., BTK inhibitor, e.g., ibrutinib; or JAK-STAT inhibitor, e.g., ruxolitinib) to the subject, reducing the amount (e.g., ceasing administration) of the inhibitor, and subsequently administering the CAR-expressing cell (e.g., a CAR19- or CAR123-expressing cell) to the subject.

[0108] In some embodiments, the method comprises administering the inhibitor (e.g., BTK inhibitor, e.g., ibrutinib; or JAK-STAT inhibitor, e.g., ruxolitinib) to the subject and subsequently administering a combination of the inhibitor and the CAR-expressing cell (e.g., a CAR19- or CAR123-expressing cell) to the subject.

[0109] In some embodiments, the method comprises administering the inhibitor (e.g., BTK inhibitor, e.g., ibrutinib, or JAK-STAT inhibitor, e.g., ruxolitinib) to the subject, reducing the amount (e.g., ceasing or discontinuing administration) of the inhibitor, and subsequently administering a combination of the CAR-expressing cell (e.g., a CAR19- or CAR123-expressing cell) and a second inhibitor (e.g., a second inhibitor other than the first inhibitor) to the subject. In some embodiments, the first inhibitor is a BTK inhibitor and the second inhibitor is a BTK inhibitor other than the first BTK inhibitor, e.g., other than ibrutinib. In some embodiments, the first inhibitor is a JAK-STAT inhibitor and the second inhibitor is a JAK-STAT inhibitor other than the first JAK-STAT inhibitor, e.g., other than ruxolitinib. In some embodiments, the first inhibitor is a JAK-STAT inhibitor and the second inhibitor is a BTK inhibitor. In some embodiments, the first inhibitor is a BTK inhibitor and the second inhibitor is a JAK-STAT inhibitor. In some embodiments, the second BTK inhibitor is chosen from one or more of GDC-0834, RN-486, CGI-560, CGI-1764, HM-71224, CC-292, ONO-4059, CNX-774, or LFM-A13, or a combination thereof. In embodiments, the second JAK-STAT inhibitor is chosen from one or more of AG490, AZD1480, tofacitinib (tasocitinib or CP-690550), or CYT387.

[0110] In one embodiment, the cells expressing a CAR molecule, e.g., a CAR molecule described herein, are administered at a dose and/or dosing schedule described herein.

[0111] In an embodiment, any method described herein further comprises administering a therapy to prevent or treat CRS. In embodiments, the therapy comprises an IL-6 inhibitor (e.g., an anti-IL6 receptor inhibitor, e.g., an anti-IL6 receptor inhibitor, e.g., tocilizumab). In other embodiments, the therapy comprises an IL-6 inhibitor in combination with one or more (or all) of a vasoactive medication, an immunosuppressive agent, a corticosteroid, or mechanical ventilation. In embodiments, the method comprises administering the IL-6 inhibitor (e.g., tocilizumab) prior to (e.g., at least 1, 2, 3, 4, 5, 6, 7, 8, 9 or 10 days or 1, 2, 3, or 4 weeks prior to) administration of a dose (e.g., a first dose) of a CAR-expressing cell (e.g., CAR-expressing cell described herein). In embodiments, the method comprises administering the IL-6 inhibitor (e.g., tocilizumab) concurrently with administration of a dose (e.g., a first dose) of a CAR-expressing cell (e.g., CAR-expressing cell described herein). In embodiments, the method comprises administering the IL-6 inhibitor (e.g., tocilizumab) after the administration of a dose (e.g., a first dose) of a CAR-expressing cell (e.g., CAR-expressing cell described herein), e.g., but prior to or within 1 week (e.g., within 1 week, 7, 6, 5, 4, 3, 2, 1 day or less) of a first sign of a fever in the subject. In embodiments, the method comprises administering the IL-6 inhibitor (e.g., tocilizumab) after the administration of a dose (e.g., a first dose) of a CAR-expressing cell (e.g., CAR-expressing cell described herein), and within 1 week (e.g., within 1 week, 7, 6, 5, 4, 3, 2, 1 day or less) of the development of a temperature of at least 38° C. (e.g., at least 38.5° C.) in the subject, e.g., for two successive measurements in 24 hours (e.g., at least 4 hours apart). In embodiments, the subject has (e.g., is diagnosed with or identified as having) a high tumor burden prior to treatment with the CAR-expressing cell. In embodiments, a high tumor burden comprises at least 40% blasts (e.g., at least 40%, 45%, 50%, 60%, 70%, 80%, 90%, 95%, or more, blasts) in bone marrow of the subject prior to administration of the CAR-expressing cell (e.g., about 1-5 days prior to administration of the CAR-expressing cell).

[0112] In embodiments, the method comprises administering a dose of tocilizumab of about 5-15 mg/kg, e.g., 8-12 mg/kg (e.g., about 8 mg/kg, about 9 mg/kg, about 10 mg/kg, about 11 mg/kg, or about 12 mg/kg).

[0113] In one embodiment, the CAR molecule is introduced into T cells, e.g., using in vitro transcription, and the subject (e.g., human) receives an initial administration of cells comprising a CAR molecule, and one or more subsequent administrations of cells comprising a CAR molecule, wherein the one or more subsequent administrations are administered less than 15 days, e.g., 14, 13, 12, 11, 10, 9, 8, 7, 6, 5, 4, 3, or 2 days after the previous administration. In one embodiment, more than one administration of cells comprising a CAR molecule are administered to the subject (e.g., human) per week, e.g., 2, 3, or 4 administrations of cells comprising a CAR molecule are administered per week. In one embodiment, the subject (e.g., human subject) receives more than one administration of cells comprising a CAR molecule per week (e.g., 2, 3 or 4 administrations per week) (also referred to herein as a cycle), followed by a week of no administration of cells comprising a CAR molecule, and then one or more additional administration of cells comprising a CAR molecule (e.g., more than one administration of the cells comprising a CAR molecule per week) is administered to the subject. In another embodiment, the subject (e.g., human subject) receives more than one cycle of cells comprising a CAR molecule, and the time between each cycle is less than 10, 9, 8, 7, 6, 5, 4, or 3 days. In one embodiment, the cells comprising a CAR molecule are administered every other day for 3 administrations per week. In one embodiment, the cells comprising a CAR molecule are administered for at least two, three, four, five, six, seven, eight or more weeks.

[0114] In one embodiment, the combination of the kinase inhibitor and the cells expressing a CAR molecule, e.g., a CAR molecule described herein, are administered as a first line treatment for the disease, e.g., the cancer, e.g., the cancer described herein. In another embodiment, the combination of the kinase inhibitor and the cells expressing a CAR molecule, e.g., a CAR molecule described herein, are administered as a second, third, fourth line treatment for the disease, e.g., the cancer, e.g., the cancer described herein.

[0115] In embodiments, any of the methods described herein further comprise performing lymphodepletion on a subject, e.g., prior to administering the one or more cells that express a CAR molecule described herein, e.g., a CAR molecule that binds CD19 or CD123. The lymphodepletion can comprise, e.g., administering one or more of melphalan, cytoxan, cyclophosphamide, and fludarabine.

### Subject

[0116] In embodiments, the subject is (e.g., is identified as) at risk of developing, has, or is diagnosed with CRS.

[0117] In embodiments, the subject has been, is being, or will be administered a CAR therapy, e.g., a CAR therapy described herein. In embodiments, the subject has been, is being, or will be administered a CAR123-expressing cell or a CAR19-expressing cell.

[0118] In embodiments, the method comprises identifying (and optionally selecting) a subject i) at risk of developing CRS; or ii) having CRS.

[0119] In embodiments, the method comprises selecting the subject for administration of the inhibitor (e.g., JAK-STAT inhibitor or BTK inhibitor). In embodiments, the subject is selected based on (i) his or her risk of developing CRS, (ii) his or her diagnosis of CRS, and/or (iii) whether he or she has been, is being, or will be administered a CAR therapy (e.g., a CAR therapy described herein, e.g., CAR19 therapy, e.g., CTL019; or a CD123 CAR therapy). In embodiments, the subject is selected for administration of the JAK-STAT or BTK inhibitor if the subject is diagnosed with CRS, e.g., severe or non-severe CRS. In embodiments, the subject is selected for administration of the JAK-STAT or BTK inhibitor if the subject is at risk of (e.g., identified as at risk of) developing CRS. In embodiments, the subject is selected for administration of the JAK-STAT or BTK inhibitor if the subject has been, is being, or will be administered a CAR therapy (e.g., a CAR therapy described herein, e.g., CAR19 therapy, e.g., CTL019; or a CAR123 therapy).

### Subject at Risk for CRS

[0120] In embodiments, the subject is identified as at risk for CRS if the subject has a high tumor burden, e.g., prior to administration of a CAR therapy (e.g., a CAR therapy described herein).

[0121] In embodiments, the subject is identified as at risk for CRS by acquiring a CRS risk status for the subject, wherein said CRS risk status comprises a measure of one, two, three, four, five, six, seven, eight, nine, ten, or more (all) of the following:

[0122] (i) the level or activity of sgp130 or IFN-gamma or a combination thereof, in the subject, e.g., in a sample (e.g., a blood sample), e.g., wherein the subject is an adult or pediatric subject;

[0123] (ii) the level or activity of sgp130, IFN-gamma, or IL1Ra, or a combination thereof (e.g., a combination of any two or all three of sgp130, IFN-gamma, and IL1Ra), in the subject, e.g., a sample (e.g., a blood sample), e.g., wherein the subject is an adult or pediatric subject;

[0124] (iii) the level or activity of sgp130 or IFN-gamma or a combination thereof, in the subject, e.g., in a sample (e.g., a blood sample), and the level of bone marrow disease in the subject, e.g., wherein the subject is a pediatric subject;

[0125] (iv) the level or activity of sgp130, IFN-gamma, or MIP1-alpha, or a combination thereof (e.g., a combination of any two or all three of sgp130, IFN-gamma, and MIP1-alpha), in the subject, e.g., in a sample (e.g., a blood sample), e.g., wherein the subject is a pediatric subject,

[0126] (v) the level or activity of sgp130, MCP1, or eotaxin, or a combination thereof (e.g., a combination of any two or all three of sgp130, MCP1, or eotaxin), in the subject, e.g., in a sample (e.g., a blood sample), e.g., wherein the subject is an adult or a pediatric subject;

[0127] (vi) the level or activity of IL-2, eotaxin, or sgp130, or a combination thereof (e.g., a combination of any two or all three of IL-2, eotaxin, or sgp130), in the subject, e.g., in a sample (e.g., a blood sample), e.g., wherein the subject is an adult or a pediatric subject;

[0128] (vii) the level or activity of IFN-gamma, IL-2, or eotaxin, or a combination thereof (e.g., a combination of any two or all three of IFN-gamma, IL-2, or eotaxin), in the subject, e.g., in a sample (e.g., a blood sample), e.g., wherein the subject is a pediatric subject;

[0129] (viii) the level or activity of IL-10 and the level of disease burden in the subject, or a combination thereof in a subject, e.g., in a sample (e.g., a blood sample), e.g., wherein the subject is a pediatric subject;

[0130] (ix) the level or activity of IFN-gamma or IL-13, or a combination thereof, in the subject, e.g., wherein the subject is a pediatric subject; or

[0131] (x) the level or activity of IFN-gamma, IL-13, or MIP1-alpha, or a combination thereof (e.g., a combination of any two or all three of IFN-gamma, IL-13, and MIP1-alpha), in a sample (e.g., a blood sample), e.g., wherein the subject is a pediatric subject; or

[0132] (xi) the level or activity of IFN-gamma or MIP1-alpha, or a combination thereof, in a sample (e.g., a blood sample), e.g., wherein the subject is a pediatric subject;

[0133] wherein the CRS risk status is indicative of the subject's risk for developing CRS, e.g., severe CRS.

[0134] Any of the aforesaid methods can further comprise, responsive to a determination of the CRS risk status, performing one, two, or more (all) of:

[0135] identifying the subject as being at high risk of developing severe CRS or at low risk of developing severe CRS;

[0136] administering a BTK inihibitor (e.g., ibrutinib) or a JAK-STAT inhibitor (e.g., ruxolitinib);

[0137] administering an altered dosing of the CAR-expressing cell therapy;

[0138] altering the schedule or time course of the CAR-expressing cell therapy;

[0139] administering a therapy to treat CRS, e.g., a therapy chosen from one or more of: an IL-6 inhibitor (e.g., an anti-IL6 receptor inhibitor, e.g., tocilizumab), a vasoactive medication, an immunosuppressive agent, a corticosteroid, or mechanical ventilation; and/or

[0140] administering an alternative therapy, e.g., for a subject at high risk of developing severe CRS, e.g., a standard of care for a particular cancer type.

[0141] In some embodiments of the methods, the CRS risk status comprises a measure of the level or activity of sgp130, IFN-gamma, or IL-13, or a combination thereof (e.g., a combination of any two or all three of sgp130, IFN-gamma, and IL-13), in the subject, e.g., in a sample (e.g., a blood sample), e.g., wherein the subject is an adult or pediatric subject.

[0142] In some embodiments of the methods, the CRS risk status is indicative of whether the subject is at high risk or low risk of developing severe CRS. For example, the CRS can be of clinical grade 1-3, or can be severe CRS of clinical grade 4-5.

[0143] In some embodiments, the methods are performed on a subject that does not have a symptom (e.g., a clinical symptom) of CRS, e.g., one or more of low blood pressure or a fever; or severe CRS, e.g., one or more of grade 4 organ toxicity or need for mechanical ventilation.

[0144] In some embodiments of the methods, a high level or activity of IFN-gamma, sgp130, MCP1, IL-10, or disease burden, or any combination thereof, is indicative of a high risk of severe CRS. In some embodiments, a low level or activity of IL13, IL1Ra, MIP1α, or eoxtaxin, or any combination thereof, is indicative of a high risk of severe CRS.

[0145] In some embodiments of the methods, a subject at high risk of severe CRS has, or is identified as having, a greater level or activity of sgp130 or IFN-gamma or a combination thereof (e.g., in a sample, e.g., a blood sample), e.g., relative to a reference.

[0146] In other embodiments of the methods, a subject at high risk of severe CRS has, or is identified as having a greater level or activity of sgp130, a greater level or activity of IFN-gamma, or a lower level or activity of IL1Ra, or a combination thereof (e.g., in a sample, e.g., a blood sample), e.g., relative to a reference. In one embodiment, the subject at high risk of severe CRS is identified as having a greater level or activity of sgp130 and a greater level or activity of IFN-gamma; a greater level or activity of sgp130 and a lower level or activity of IL1Ra; a greater level or activity of IFN-gamma and a lower level or activity of IL1Ra; or a greater level or activity of sgp130, a greater level or activity of IFN-gamma, and a lower level or activity of IL1Ra, e.g., compared to a reference. In some embodiments, the reference is a subject at low risk of severe CRS or a control level or activity. The subject can be a human, e.g., an adult or pediatric subject.

[0147] In some embodiments of the methods, a subject at high risk of severe CRS has, or is identified as having, a greater level or activity of sgp130 or IFN-gamma or a combination thereof, and a greater level of bone marrow disease, in the subject (e.g., in a sample, e.g., a blood sample), e.g., relative to a reference, e.g., compared to a subject at low risk of severe CRS or compared to a control level or activity. In one embodiment, the subject at high risk of severe CRS is identified as having a greater level of sgp130 and IFN-gamma; sgp130 and bone marrow disease; IFN-gamma and bone marrow disease; or sgp130, IFN-gamma and bone marrow disease, e.g., compared to a reference, e.g., a subject at low risk of severe CRS or a control level or activity. The subject can be a human, e.g., a pediatric subject.

[0148] In some embodiments of the methods, a subject (e.g., a pediatric subject) at high risk of severe CRS is identified as having a greater level or activity of sgp130, a greater level or activity of IFN-gamma, or a lower level or activity of MIP1-alpha, or a combination thereof (e.g., in a sample, e.g., a blood sample) compared to a reference, e.g., a subject at low risk of severe CRS or compared to a control level or activity. In one embodiment, a subject at high risk of severe CRS is identified as having a greater level or activity of sgp130 and a greater level or activity of IFN-gamma; a greater level or activity of sgp130 and a lower level or activity of MIP1-alpha; a greater level or activity of IFN-gamma and a lower level or activity of MIP1-alpha; a greater level or activity of sgp130, a greater level or activity of IFN-gamma, and a lower level or activity of MIP1-alpha, e.g., compared to a reference, e.g., a subject at low risk of severe CRS or compared to a control level or activity.

[0149] In some embodiments of the methods, a subject at high risk of severe CRS is identified as having a greater level or activity of sgp130, a greater level or activity of MCP1, or a lower level or activity of eotaxin, or a combination thereof (e.g., in a sample, e.g., a blood sample) compared to a reference, e.g., a subject at low risk of severe CRS or compared to a control level or activity. In some embodiments, a subject at high risk of severe CRS is identified as having: a greater level or activity of sgp130 and a greater level or activity of MCP1, a greater level or activity of sgp130 and a lower level or activity of eotaxin, a greater level or activity of MCP1 and a lower level or activity of eotaxin, a greater level or activity of sgp130, a greater level or activity of MCP1, and a lower level or activity of eotaxin, compared to a reference, e.g., a subject at low risk of severe CRS or compared to a control level or activity.

[0150] In some embodiments of the methods, a subject at high risk of severe CRS is identified as having an altered (e.g., greater) level or activity of IL-2, a lower level or activity of eotaxin, or a greater level or activity of sgp130, or a combination thereof (e.g., in a sample, e.g., a blood sample) compared to a reference, e.g., a subject at low risk of severe CRS or compared to a control level or activity. In some embodiments, a subject at high risk of severe CRS is identified as having: an altered (e.g., greater) level or activity of IL-2 and a lower level or activity of eotaxin, an altered (e.g., greater) level or activity of IL-2 and a greater level or activity of sgp130, a lower level or activity of eotaxin and a greater level or activity of sgp130, an altered (e.g., greater) level or activity of IL-2, a lower level or activity of eotaxin, and a greater level or activity of sgp130, compared to a reference, e.g., a subject at low risk of severe CRS or compared to a control level or activity.

[0151] In some embodiments of the methods, a subject at high risk of severe CRS is identified as having a greater level or activity of IFN-gamma, an altered (e.g., greater) level or activity of IL-2, or a lower level or activity of eotaxin, or a combination thereof (e.g., in a sample, e.g., a blood sample) compared to a reference, e.g., a subject at low risk of severe CRS or compared to a control level or activity. In some embodiments, the subject is a pediatric subject. In some embodiments, a subject at high risk of severe CRS is identified as having: a greater level or activity of IFN-gamma and an altered (e.g., greater) level or activity of IL-2, a greater level or activity of IFN-gamma and a lower level or activity of eotaxin, an altered (e.g., greater) level or activity of IL-2 and a lower level or activity of eotaxin, a greater level or activity of IFN-gamma, an altered (e.g., greater) level or activity of IL-2, and a lower level or activity of eotaxin, compared to a reference, e.g., a subject at low risk of severe CRS or compared to a control level or activity.

[0152] In some embodiments of the methods, a subject at high risk of severe CRS is identified as having a greater level or activity of IL-10 or a greater level of disease burden, or a combination thereof (e.g., in a sample, e.g., a blood sample) compared to a reference, e.g., a subject at low risk of severe CRS or compared to a control level or activity. In some embodiments, the subject is a pediatric subject.

[0153] In some embodiments of the methods, a subject at high risk of severe CRS is identified as having a greater level or activity of IFN-gamma or a lower level of IL-13, or a combination thereof (e.g., in a sample, e.g., a blood sample) compared to a reference, e.g., a subject at low risk of severe CRS or compared to a control level or activity. In some embodiments, the subject is a pediatric subject.

[0154] In some embodiments of the methods, a subject at high risk of severe CRS is identified as having a greater level or activity of IFN-gamma, a lower level or activity of IL-13, a lower level or activity of MIP1-alpha, or a combination thereof (e.g., in a sample, e.g., a blood sample) compared to a reference, e.g., a subject at low risk of severe CRS or compared to a control level or activity. In some embodiments, the subject is a pediatric subject. In some embodiments, a subject at high risk of severe CRS is identified as having: a greater level or activity of IFN-gamma or a lower level or activity of IL-13, a greater level or activity of IFN-gamma or a lower level or activity of MIP1-alpha, a lower level or activity of IL-13 or a lower level or activity of MIP1-alpha, a greater level or activity of IFN-gamma, a lower level or activity of IL-13, and a lower level or activity of MIP1-alpha, compared to a reference, e.g., a subject at low risk of severe CRS or compared to a control level or activity.

[0155] In some embodiments of the methods, a subject at high risk of severe CRS is identified as having a greater level or activity of IFN-gamma or a lower level or activity of MIP1-alpha, or a combination thereof (e.g., in a sample, e.g., a blood sample) compared to a reference, e.g., a subject at low risk of severe CRS or compared to a control level or activity. In some embodiments, the subject is a pediatric subject.

[0156] In some embodiments, e.g., in a 3-biomarker panel, e.g., containing IL2, eotaxin, and sgp130, or in a 3-biomarker panel containing IFN-gamma, IL2, and eotaxin (e.g., in pediatric patients) a greater level or activity of IL2 indicates that a subject is at high risk of severe CRS. In other embodiments, e.g., in a 2-biomarker panel, e.g., for pediatric patients, a greater level or activity of IL2 indicates that a subject is at low risk of severe CRS.

[0157] In some embodiments of the methods, a greater level of a marker described herein is a level greater than or equal to 1, 2, 5, 10, 20, 50, 100, 200, 500, 1000, 2000, 5000, 10,000, 20,000, 50,000, 100,000, 200,000, or 500,000 pg/ml. In some embodiments, a greater level of sgp130 is greater than or equal to 150,000, 200,000, 210,000, 215,000, 218,000, 218,179, 220,000, 225,000, 230,000, or 250,000 pg/ml. In some embodiments, a greater level of IFN-gamma is greater than or equal to 6, 7, 8, 9, 10, 10.4272, 10.5, 11, 12, 13, 14, 15, 16, 17, 18, 19, 20, 21, 22, 23, 24, 25, 26, 27, 27.6732, 28, 29, 30, 31, 32, 33, 34, 35, 40, 50, 60, 70, 75, 80, 85, 90, 91, 92, 93, 94, 94.8873, 95, 96, 97, 98, 99, 100, 105, 110, 115, or 120 pg/ml. In some embodiments, a greater level of IL-10 is greater than or equal to 5, 6, 7, 8, 9, 10, 11, 11.7457, 12, 13, 14, 15, 16, 17, 18, 19, or 20 pg/ml. In some embodiments, a greater tumor burden is greater than or equal to 25, 30, 35, 40, 45, 50, 51.9, 55, 60, 65, 70, or 75% In some embodiments, a lower level of sgp130, IFN-gamma, IL-10, or tumor burden is a level less than or equal to any of the values in this paragraph.

[0158] In some embodiments of the methods, a lower level of a marker described herein is a level greater than or equal to 1, 2, 5, 10, 20, 50, 100, 200, 500, 1000, 2000, 5000, 10,000, 20,000, 50,000, 100,000, 200,000, or 500,000 pg/ml. In some embodiments, a lower level of IL1Ra is less than or equal to 550, 575, 600, 625, 650, 657.987, 675, 700, 720, or 750 pg/ml. In some embodiments, a lower level of MCP1 is less than or equal to 3500, 4000, 4100, 4200, 4300, 4400, 4500, 4600, 4636.52, 4700, 4800, 4900, 5000, or 5500 pg/ml. In some embodiments, a lower level of eotaxin is less than or equal to 20, 21, 22, 23, 24, 25, 26, 27, 28, 29, 29.0902, 30, 31, 32, 33, 34, 35, 36, 37, 38, 39, or 40 pg/ml. In som embodiments, a lower level of MIP1a is less than or equal to 20, 21, 22, 23, 24, 25, 26, 27, 28, 29, 30, 30.1591, 31, 32, 33, 34, 35, 36, 37, 38, 39, or 40 pg/ml. In some embodiments, a greater level of IL1Ra, MCP1, eotaxin, or MIP1a is a level greater than or equal to any of the values in this paragraph. In some embodiments of the methods, the sensitivity is at least 0.75, 0.79, 0.80, 0.82, 0.85, 0.86, 0.90, 0.91, 0.93, 0.95, 0.96, 0.97, 0.98, 0.99, or 1.0. In some embodiments, the specificity is at least 0.75, 0.77, 0.80, 0.85, 0.86, 0.89, 0.90, 0.92, 0.94, 0.95, 0.96, 0.97, 0.98, 0.99, or 1.0. In some embodiments, the PPV is at least 0.62, 0.65, 0.70, 0.71, 0.75, 0.80, 0.82, 0.83, 0.85, 0.90, 0.91, 0.92, 0.95, 0.96, 0.97, 0.98, 0.99, or 1.0. In some embodiments, the NPV is at least 0.80, 0.85, 0.90, 0.92, 0.94, 0.95, 0.96, 0.97, 0.98, 0.99, or 1.0.

[0159] In some embodiments of the methods, a measure of eotaxin comprises a measure of one or more of (e.g., two or all of) eotaxin-1, eotaxin-2, and eotaxin-3. In some embodiments, a measure of eotaxin comprises a measure of eotaxin-1 and eotaxin-2, eotaxin-1 and eotaxin-3, or eotaxin-2 and eotaxin-3.

[0160] Any of the methods disclosed herein can further include the step of acquiring a measure of the level or activity of one, two, three, four, five, ten, twenty or more of a cytokine chosen from sTNFR2, IP10, sIL1R2, sTNFR1, M1G, VEGF, sILR1, TNFα, IFNα, GCSF, sRAGE, IL4, IL10, IL1R1, IFN-γ, IL6, IL8, sIL2Rα, sgp130, sIL6R, MCP1, MIP1α, MIP1β, or GM-CSF, or a combination thereof, in the subject, e.g., in a sample (e.g., a blood sample) from the subject. In some embodiments, a subject having, or at high risk of having, severe CRS has, or is identified as having, a greater level or activity of one or more (e.g., two, three, four, five, ten, fifteen, twenty, or all) of a cytokine chosen from sTNFR2, IP10, sIL1R2, sTNFR1, M1G, VEGF, sILR1, TNFα, IFNα, GCSF, sRAGE, IL4, IL10, IL1R1, IFN-γ, IL6, IL8, sIL2Rα, sgp130, sIL6R, MCP1, MIP1α, MIP1β, or GM-CSF or a combination thereof, compared to a reference, e.g., a subject at low risk of severe CRS or compared to a control level or activity.

[0161] Any of the methods disclosed herein can further include the step of acquiring a measure of the level or activity of one, two, three, four, five, six, seven, eight, or all of a cytokine chosen from IFN-γ, IL10, IL6, IL8, IP10, MCP1, M1G, sIL2Rα, GM-CSF, or TNFα, or or a combination thereof, in the subject, e.g., in a sample (e.g., a blood sample) from the subject. In some embodiments, a subject having, or at high risk of having, severe CRS has, or is identified as having, a greater level or activity of one or more (e.g., two, three, four, five, six, seven, eight, or all) of a cytokine chosen from IFN-γ, IL10, IL6, IL8, IP10, MCP1, M1G, sIL2Rα, GM-CSF, or TNFα or a combination thereof, compared to a reference, e.g., a subject at low risk of severe CRS or compared to a control level or activity.

[0162] Any of the methods disclosed herein can further include the step of acquiring a measure of the level or activity of one, two, three, four, five, six, or all of a cytokine chosen from IFN-γ, IL10, IL6, IL8, IP10, MCP1, M1G, or sIL2Rα, or or a combination thereof, in the subject, e.g., in a sample (e.g., a blood sample) from the subject. In some embodiments, a subject having, or at high risk of having, severe CRS has, or is identified as having, a greater level or activity of one or more (e.g., two, three, four, five, six, or all) of a cytokine chosen from IFN-γ, IL10, IL6, IL8, IP10, MCP1, M1G, or sIL2Rα, or a combination thereof, compared to a reference, e.g., a subject at low risk of severe CRS or compared to a control level or activity.

[0163] In some embodiments, any the methods disclosed herein can further include the step of determining the level of C-reactive protein (CRP) in a sample (e.g., a blood sample) from the subject. In one embodiment, a subject at low risk of severe CRS has, or is identified as having, a CRP level of less than 7 mg/dL (e.g., 7, 6.8, 6, 5, 4, 3, 2, 1 mg/dL or less). In one embodiment, a subject at high risk of severe CRS has, or is identified as having, a greater level of CRP in a sample (e.g., a blood sample) compared to a subject at low risk of severe CRS or compared to a control level or activity. In one embodiment, the greater level or activity is at least 2-fold greater (e.g., at least 2, 3, 4, 5, 6, 7, 8, 9, 10, 15, 20, 25, 30, 40, 50, 100, 500, 1000-fold or greater) compared to a subject at low risk of severe CRS or compared to a control level or activity.

[0164] In other embodiments, the methods, disclosed herein further include the step of selecting or altering the therapy, e.g., the CAR-expressing cell therapy, for the subject, based on the CRS risk status acquired. In embodiments where the CRS risk status acquired is that the subject is at high risk of severe CRS, the therapy is altered such that it is discontinued, or a subsequent (e.g., second, third, or fourth) dose of the therapy (e.g., the CAR-expressing cells) is at a lower dose than the previous dose. In other embodiments, a subsequent (e.g., second, third, or fourth) dose of CAR-expressing cells comprises a different CAR or different cell type than the previous CAR-expressing cell therapy administered to the subject.

[0165] In other embodiments of the methods, the measure of one or more of biomarkers (e.g., one or more biomarkers of (i)-(xi)) is obtained from a sample (e.g., a blood sample) acquired from the subject. In some embodiments, the subject, e.g., a sample from the subject, is evaluated while receiving the CAR-expressing cell therapy. In other embodiments, the subject, e.g., a sample from the subject, is evaluating after receiving the CAR-expressing cell therapy. For example, the subject, e.g., a sample from the subject, is evaluated 10 days or less (e.g., 1-10 days, 1-9 days, 1-8 days, 1-7 days, 1-6 days, 1-5 days, 1-4 days, 1-3 days, or 1-2 days, 5 days or less, 4 days or less, 3 days or less, 2 days or less, 1 day or less, e.g., 1, 3, 5, 10, 12, 15, 20 hours) after infusion with the CAR-expressing cell therapy. In some embodiments, the subject is evaluated 5 days or less, 4 days or less, 3 days or less, 2 days or less, 1 day or less (e.g., but no earlier than 1, 3, 5, 10, 12, 15, 20 hours, after infusion of the CAR-expressing therapy). In other embodiments, the measure of one or more of biomarkers comprises detection of one or more of nucleic acid (e.g., mRNA) levels or protein levels.

[0166] In embodiments, the method comprises determining whether a subject has severe CRS. The method includes acquiring a CRS risk status, e.g., in response to an immune cell based therapy, e.g., a CAR-expressing cell therapy (e.g., a CAR19-expressing cell therapy or a CAR123-expressing cell therapy) for the subject, wherein said CRS risk status includes a measure of one, two, or more (all) of the following:

[0167] (i) the level or activity of one or more (e.g., 3, 4, 5, 10, 15, 20, or more) cytokines chosen from sTNFR2, IP10, sIL1R2, sTNFR1, M1G, VEGF, sILR1, TNFα, IFNα, GCSF, sRAGE, IL4, IL10, IL1R1, IFN-γ, IL6, IL8, sIL2Rα, sgp130, sIL6R, MCP1, MIP1α, MIP1β, or GM-CSF, or analytes chosen from C-reactive protein (CRP), ferritin, lactate dehydrogenase (LDH), aspartate aminotransferase (AST), or blood urea nitrogen (BUN), alanine aminotransferase (ALT), creatinine (Cr), or fibrinogen, or a combination thereof, in a sample (e.g., a blood sample);

[0168] (ii) the level or activity of IL6, IL6R, or sgp130, or a combination thereof (e.g., a combination of any two or all three of IL6, IL6R, and sgp130), in a sample (e.g., a blood sample); or

[0169] (iii) the level or activity of IL6, IFN-gamma, or IL2R, or a combination thereof (e.g., a combination of any two or all three of IL6, IFN-gamma, and IL2R), in a sample (e.g., a blood sample);

[0170] wherein the value is indicative of the subject's severe CRS status.

[0171] In embodiments, an elevated level of the cytokines (i)-(iii), or all analytes except fibrinogen, is indicative of severe CRS. In embodiments, low fibrinogen is indicative of severe CRS.

### Compositions and Compositions for Use

[0172] In another aspect, the disclosure features a composition (e.g., one or more dosage formulations, combinations, or one or more pharmaceutical compositions) comprising a cell expressing a CAR described herein (e.g., CD123 CAR) and an inhibitor (e.g., JAK-STAT inhibitor, e.g., ruxolitinib) described herein. The CAR-expressing cell and the inhibitor (e.g., JAK-STAT inhibitor) can be in the same or different formulation or pharmaceutical composition. The CAR-expressing cell and the one or more kinase inhibitors can be present in a single dose form, or as two or more dose forms.

[0173] In embodiments, the compositions disclosed herein are for use as a medicament.

[0174] In embodiments, the compositions disclosed herein are used in the treatment of a disease associated with expression of an antigen described herein, e.g., a B-cell antigen (e.g., CD123 or CD19).

[0175] In another aspect, the disclosure features a composition (e.g., one or more dosage formulations, combinations, or one or more pharmaceutical compositions) comprising a cell expressing a CAR described herein (e.g., CD123 CAR) and an inhibitor (e.g., JAK-STAT inhibitor) described herein, for use in a method of treating (or in the preparation of a medicament for treating) a disease associated with expression of an antigen (e.g., B cell antigen, e.g., CD123 or CD19), e.g., a cancer described herein.

[0176] In another aspect, the disclosure features a composition (e.g., one or more dosage formulations, combinations, or one or more pharmaceutical compositions) comprising a cell expressing a CAR described herein (e.g., CD123 CAR or CD19 CAR) and an inhibitor (e.g., JAK-STAT inhibitor or BTK inhibitor) described herein, for use in a method of preventing CRS in a subject.

[0177] In another aspect, the invention pertains to a cell expressing a CAR molecule described herein for use as a medicament in combination with a kinase inhibitor, e.g., a kinase inhibitor described herein (e.g., a BTK inhibitor such as ibrutinib, or JAK-STAT inhibitor such as ruxolitinib), e.g., to prevent CRS in a subject. In another aspect, the invention pertains to a kinase inhibitor described herein (e.g., a BTK inhibitor such as ibrutinib, or JAK-STAT inhibitor such as ruxolitinib) for use as a medicament in combination with a cell expressing a CAR molecule described herein, e.g., to prevent CRS in a subject.

[0178] In another aspect, the invention pertains to a cell expressing a CAR molecule described herein for use in combination with a kinase inhibitor, e.g., a kinase inhibitor described herein (e.g., a BTK inhibitor such as ibrutinib, or JAK-STAT inhibitor such as ruxolitinib), in the treatment of a disease expressing the B-cell antigen (e.g., CD19 or CD123).

[0179] In another aspect, the invention pertains to a kinase inhibitor described herein (e.g., a BTK inhibitor such as ibrutinib, or JAK-STAT inhibitor such as ruxolitinib), for use in combination with a cell expressing a CAR molecule described herein, in the treatment of a disease expressing the B-cell antigen (e.g., CD19 or CD123).

[0180] In another aspect, the invention pertains to a kinase inhibitor described herein (e.g., a BTK inhibitor such as ibrutinib, or JAK-STAT inhibitor such as ruxolitinib), for use in combination with a cell expressing a CAR molecule described herein, in the reduction of one or more side effects of a CAR therapy described herein.

[0181] In another aspect, the invention pertains to a cell expressing a CAR molecule described herein for use (e.g., as a medicament) in combination with a cytokine, e.g., IL-7, IL-15 and/or IL-21 as described herein. In another aspect, the invention pertains to a cytokine described herein for use (e.g., as a medicament) in combination with a cell expressing a CAR molecule described herein.

[0182] In another aspect, the invention pertains to a cell expressing a CAR molecule described herein for use (e.g., as a medicament) in combination with a cytokine, e.g., IL-7, IL-15 and/or IL-21 as described herein, in the treatment of a disease expressing a B cell antigen, e.g., CD123 or CD19. In another aspect, the invention pertains to a cytokine described herein for use (e.g., as a medicament) in combination with a cell expressing a CAR molecule described herein, in the treatment of a disease expressing B cell antigen, e.g., CD123 or CD19.

[0183] In some aspects, the present disclosure provides a method of distinguishing between CRS and sepsis in a subject, comprising acquiring a measure of one or more of the following:

[0184] (i) the level or activity of one or more of (e.g., 2, 3, 4, 5, 6, 7, 8, 9, 10, 11, 12, 13, 14, 15, or all of) GM-CSF, HGF, IFN-γ, IFN-α, IL-10, IL-15, IL-5, IL-6, IL-8, IP-10, MCP1, MIG, MIP-1β, sIL-2Rα, sTNFRI, and sTNFRII, wherein a level or activity that is higher than a reference is indicative of CRS; or

[0185] (ii) the level or activity of one or more of (e.g., 2, 3, 4, 5, 6, or all of) CD163, IL-1β, sCD30, sIL-4R, sRAGE, sVEGFR-1, and sVEGFR-2, wherein a level or activity that is higher than a reference is indicative of sepsis.

[0186] In embodiments, the method comprises administering a therapy (e.g., a therapy described herein) to treat CRS if the measure is indicative of CRS. In embodiments, the method comprises administering a therapy to treat sepsis if the measure is indicative of sepsis.

[0187] The present disclosures also provides, in some aspects, a kit for distinguishing between CRS and sepsis in a patient, the kit comprising a set of reagents that specifically detects the level or activity of one or more (e.g., 2, 3, 4, 5, 6, 7, 8, 9, 10, 11, 12, 13, 14, 15, 16, 17, 18, 19, 20, 2, 22, or all of) genes or proteins chosen from:

[0188] GM-CSF, HGF, IFN-γ, IFN-α, IL-10, IL-15, IL-5, IL-6, IL-8, IP-10, MCP1, MIG, MIP-1β, sIL-2Rα, sTNFRI, sTNFRII, CD163, IL-1β, sCD30, sIL-4R, sRAGE, sVEGFR-1, and sVEGFR-2; and

[0189] instructions for using said kit;

[0190] wherein said instructions for use provide that if one or more of (e.g., 2, 3, 4, 5, 6, 7, 8, 9, 10, 11, 12, 13, 14, 15, or all of) the detected level or activity of GM-CSF, HGF, IFN-γ, IFN-α, IL-10, IL-15, IL-5, IL-6, IL-8, IP-10, MCP1, MIG, MIP-1β, sIL-2Rα, sTNFRI, or sTNFRII is greater than a reference value, the subject is likely to have CRS,

[0191] and/or if one or more of (e.g., 2, 3, 4, 5, 6, or all of) the detected level or activity of CD163, IL-1β, sCD30, sIL-4R, sRAGE, sVEGFR-1, or sVEGFR-2, is greater than a reference value, the subject is likely to have sepsis.

[0192] The present disclosure also provides, in some aspects, a reaction mixture comprising:

[0193] a set of reagents that specifically detects the level or activity of one or more (e.g., 2, 3, 4, 5, 6, 7, 8, 9, 10, 11, 12, 13, 14, 15, 16, 17, 18, 19, 20, 2, 22, 23, or all of) genes or proteins chosen from: GM-CSF, HGF, IFN-γ, IFN-α, IL-10, IL-15, IL-5, IL-6, IL-8, IP-10, MCP1, MIG, MIP-1β, sIL-2Rα, sTNFRI, sTNFRII, CD163, IL-1β, sCD30, sIL-4R, sRAGE, sVEGFR-1, and sVEGFR-2, and

[0194] a biological sample, e.g., a blood sample.

[0195] In embodiments, the biological sample is from a subject treated with a CAR-expressing cell therapy and/or having a symptom of CRS and/or sepsis.

[0196] The present disclosure also provides, in certain aspects, a method of identifying sepsis in a subject, comprising acquiring a measure of one or more of the following:

[0197] (i) the level or activity of one or more of (e.g., 2, 3, 4, 5, 6, 7, 8, 9, 10, 11, 12, 13, 14, 15, 16, 17, 18, 19, 20, 21, 22, or all of) ANG2, GCSF, IFNα, IL1RA, IL4, IL6, MIG, MIP1α, PTX3, TNFα, sCD163, sCD30, sIL-1RI, sIL-1RII, sIL-2Rα, sIL-4R, sRAGE, sTNFRI, sTNFRII, sVEGFR1, sVEGFR2, sVEGFR3, and VEGF, wherein a level or activity that is greater relative to a reference is indicative of sepsis;

[0198] (ii) the level or activity of one or more of (e.g., both of) IL13 and RANTES, wherein a level or activity that is lower relative to a reference is indicative of sepsis.

[0199] In some aspects, the present disclosure provides a method of treating one or more of a neurological toxicity, CRS, or posterior reversible encephalopathy syndrome (PRES), comprising administering to a subject in need thereof a therapeutically effective amount of cyclophosphamide. In related aspects, the present disclosure provides cyclophosphamide for use in treating neurological toxicity, CRS, or posterior reversible encephalopathy syndrome (PRES). In embodiments, the administration of cyclophosphamide is subsequent to a cell-based therapy, e.g., a cell-based therapy for cancer, a CD19-inhibiting therapy, or a CD19-depleting therapy, or the subject has been previously treated with a cell-based therapy, e.g., a cell-based therapy for cancer, a CD19-inhibiting therapy, or a CD19-depleting therapy. In embodiments, the administration of cyclophosphamide is prior to, at the same time as, or after the cell-based therapy.

[0200] In embodiments, the patient has, or is identified as having, CRS, PRES, or both. In some embodiments, the subject has been treated with a CD19 inhibiting or depleting therapy. In some embodiments, the CD19 inhibitor is a CD19 antibody, e.g., a CD19 bispecific antibody (e.g., a bispecific T cell engager that targets CD19, e.g., blinatumomab). In some embodiments, the therapy comprises a CAR-expressing cell, e.g., an anti-BCMA CAR or anti-CD19 CAR. In embodiments, the subect suffers from a neurological toxicity, e.g., focal deficits (e.g., cranial nerve palsy or hemiparesis) or global abnormalities (e.g., generalized seizures, confusion), or status epilepticus. In embodiments, the subject does not have any clinical symptoms of CRS. In embodiments, the subject has one or more clinical symptoms of CRS. In embodiments, the subject has, or is identified as having, elevated IL-6 relative to a reference, e.g., to the subject's level of IL-6 prior to therapy with a CAR-expressing cell. In embodiments, the subject has, or is identified as having, elevated serum levels of a cytokine associated with CRS (e.g., IL-6 and/or IL-8) relative to a reference. In embodiments, the subject has, or is identified as having, elevated levels of a cytokine associated with CRS (e.g., CSF IL-6 and/or IL-8) relative to a reference. In embodiments, the subject is treated or has been treated with a therapy for CRS such as tocilizumab or a corticosteroid (e.g., (methylprednisolone, hydrocortisone, or both). In embodiments, the subject has, or is identified as having, an increase in circulating, activated CR-expressing cells. In embodiments, the subject has, or is identified as having, CAR-expressing cells in the CSF.

[0201] Unless otherwise defined, all technical and scientific terms used herein have the same meaning as commonly understood by one of ordinary skill in the art to which this invention belongs. Although methods and materials similar or equivalent to those described herein can be used in the practice or testing of the present invention, suitable methods and materials are described below. All publications, patent applications, patents, and other references mentioned herein are incorporated by reference in their entirety. In addition, the materials, methods, and examples are illustrative only and not intended to be limiting. Headings, sub-headings or numbered or lettered elements, e.g., (a), (b), (i) etc, are presented merely for ease of reading. The use of headings or numbered or lettered elements in this document does not require the steps or elements be performed in alphabetical order or that the steps or elements are necessarily discrete from one another. Other features, objects, and advantages of the invention will be apparent from the description and drawings, and from the claims.

### BRIEF DESCRIPTION OF THE DRAWINGS

[0202] The following detailed description of preferred embodiments of the invention will be better understood when read in conjunction with the appended drawings. For the purpose of illustrating the invention, there are shown in the drawings embodiments which are presently preferred. It should be understood, however, that the invention is not limited to the precise arrangements and instrumentalities of the embodiments shown in the drawings.

[0203] FIG. 1A is a schematic illustrating the experiments performed as described in Example 1, e.g., to generate a mouse model of CRS after CART. FIG. 1B is a graph showing the expansion of CART cells after AML injection. FIG. 1C is a survival curve showing the survival of mice after a high dose of CART123. FIG. 1D is a panel of graphs showing the levels of various cytokines in mice treated with high dose CART123.

[0204] FIG. 2A is a schematic illustrating the experiments performed as described in Example 1, e.g., to determine the effect of ruxolitinib on CRS after CART therapy. FIG. 2B is a graph showing the change in weight of the mice, as measured by % change from baseline, which is plotted on the y axis against time on the x axis. FIG. 2C is a graph showing the disease burden, as measured by leukemic cells/ul (huCD45 dim cells), from serial retro-orbital bleedings, which is plotted on the y axis against time on the x axis. FIG. 2D is a graph showing the change in weight of the mice when treated with ruxolitinib. Weight as measured by % change from baseline is plotted on the y axis against time on the x axis. FIG. 2E is a graph showing the absolute CD3+ cell counts from serial retro-orbital bleedings from the mice. Serial retro-orbital bleedings were performed at the indicated time points on x-axis. Absolute CD3+ cell count is plotted on the Y axis. FIG. 2F is a set of graphs showing the level of inflammatory cytokines from mouse serum obtained by retro-orbital bleeding of the mice one week after CAR123 injection. FIG. 2G is a survival plot showing the survival of mice treated with 60 mg/kg ruxolitinib in combination with CART123. FIG. 2H is a flow cytometry plot showing an analysis of peripheral blood from surviving mice treated with ruxolitinib at 70 days post AML injection (gated on live human CD45 positive cells).

[0205] FIG. 3A is a schematic of the experiments described in Example 2, in particular the generation of a model for CRS after CART19 treatment in B cell neoplasms. FIG. 3B is an image of spleen from a representative mouse sacrificed before T cell treatment, showing high tumor burden. FIG. 3C is a flow cytometry plot showing a high level of circulating neoplastic B cells present in the peripheral blood (PB) at time of randomization (gating strategy: time gate, lymphocytes, single cells, live gate, huCD45+ muCD45−). FIG. 3D is a survival curve showing that mice treated with CART19 experienced a significantly reduced overall survival. FIG. 3E is a panel of graphs showing a Luminex analysis of serum human cytokines, which revealed significantly increased cytokines in PB of mice receiving CART19 as compared as no treatment. For FIGS. 3C-3E, all graphs were representative of two independent experiments (5 mice per group). Student's t-test was used to compare two groups. Survival curves were compared using the log-rank test. Asterisks represent p-values (*=<0.05, **=<0.01, ***=<0.001, ****=<0.0001) and “ns” means “not significant” (p>0.05).

[0206] FIG. 4A is a schematic showing the experiments in Example 2, e.g., administration of CART19 in combination with ibrutinib or vehicle in the mouse model generated in Example 2. FIG. 4B is a survival curve showing that mice treated with CART19 plus ibrutinib experienced a significantly increased overall survival. FIG. 4C is a graph showing the number of CD19+ cells in peripheral blood after vehicle or ibrutinib treatment. FIG. 4D is a graph showing that T cell expansion was not negatively affected by ibrutinib treatment (rather, T cell expansion was augmented by ibrutinib treatment). FIG. 4E is a panel of graphs showing the level of serum cytokines from mice treated with CART19 or CART19+ibrutinib analyzed by Luminex; a significant reduction in all the cytokines involved in CRS was observed. FIG. 4F is a panel of graphs showing significant cytokine production in a dose-dependent manner in primary MCL cells incubated for 24 hours with ibrutinib. All graphs in FIGS. 4B-4F are representative of two independent experiments (5 mice per group). Student's t-test was used to compare two groups; in analysis where multiple groups were compared, one-way analysis of variance (ANOVA) was performed with Holm-Sidak correction for multiple comparisons. Survival curves were compared using the log-rank test. Asterisks represent p-values (*=<0.05, **=<0.01, ***=<0.001, ****=<0.0001) and “ns” means “not significant” (p>0.05).

[0207] FIG. 5 is a graph showing serum cytokine concentrations in xenograft mice bearing primary pediatric ALL treated with CD19 CAR T cells. NSG mice were given 10⁶ primary ALL and 5×10⁶ autologous CD19 CAR T cells seven days later. Serum was collected 3 days following T cell delivery, and a subgroup of animals was given tocilizumab on days 1 and 3 after T cells. Cytokine concentrations were measured in pg/mL.

[0208] FIG. 6 is a graph showing serum cytokine concentrations in xenograft mice bearing an ALL cell line treated with CD19 CAR T cells. NSG mice were engrafted with 10⁶ Nalm-6 ALL cells and seven days later given 5×10⁶ CD19 CAR T cells derived from a normal donor. Serum was collected 3 days following T cell delivery, and a subgroup of animals was given tocilizumab on days 1 and 3 after T cells. Cytokine concentrations are measured in pg/mL.

[0209] FIG. 7A-7J are graphs showing cytokine expression after cellular co-culture. T cells, targets and APCs were combined at a ratio of 10:50:1, respectively. Supernatants were collected after 18 hours of co-culture. Cytokine levels are measured in pg/mL. Significant differences are denoted with either a * or **, and represent a p value of <0.05.

[0210] FIG. 8A-8E are graphs showing cytokine secretion from co-culture experiments combining monocyte-lineage cells with T cells and targets. Monocyte-lineage cells were differentiated in vitro, and T cells, targets and APCs were combined at a ratio of 10:50:1, respectively. Supernatants were collected at 18 and 48 hours and analyzed for cytokine concentrations, measured in pg/mL.

[0211] FIG. 9A-9C are graphs showing transcriptional analysis of isolated cell populations. T cells and targets were separated from APCs using trans-well inserts and co-cultured for 18 hours. 697 RNA transcripts were quantified from each cell population and log counts of each are displayed. Transcriptional profile of (A) CD19 CAR T cells when combined with targets and when combined with targets and pooled monocytes, (B) APCs when combined with targets and when combined with targets and untargeted T cells, and (C) APCs when combined with targets and untargeted T cells, and when combined with targets and targeted T cells.

[0212] FIG. 10 is a graph showing transcript profile of activated CD19 CAR T cells and monocyte-lineage APCs. Cells were harvested from trans-well co-culture of CD19 CAR T cells, Nalm-6 leukemia and pooled monocytes after 18 hours. Transcript counts from T cells are displayed in blue, and counts from APCs in red.

[0213] FIG. 11A-11C are graphs showing T cell degranulation in the presence of APCs. T cells expressing either (A) no CAR molecule, (B) GD2-targeted CAR or (C) CD19-targeted CAR were combined with CD19+ target ALL cell line Nalm-6. Degranulation was measured by quantification of CD107a surface expression.

[0214] FIG. 12 is a diagram showing NanoString analysis of PBMCs collected from patients with ALL treated with CD19 CAR T cells. Peripheral blood was collected on first day of fever after engineered T cell infusion. The first seven patients had T cells detectable in peripheral blood with no detectable ALL, while the last three patients had only ALL cells and no detectable T cells.

[0215] FIG. 13 is a set of images showing microscopic analysis of peripheral blood T cells collected at time of first fever after CD19 CAR T cell infusion in patients with acute lymphoblastic leukemia. Images captured at 1000× magnification.

### DETAILED DESCRIPTION

### Definitions

[0216] Unless defined otherwise, all technical and scientific terms used herein have the same meaning as commonly understood by one of ordinary skill in the art to which the invention pertains.

[0217] The term “a” and “an” refers to one or to more than one (i.e., to at least one) of the grammatical object of the article. By way of example, “an element” means one element or more than one element.

[0218] The term “about” when referring to a measurable value such as an amount, a temporal duration, and the like, is meant to encompass variations of ±20% or in some instances ±10%, or in some instances ±5%, or in some instances ±1%, or in some instances ±0.1% from the specified value, as such variations are appropriate to perform the disclosed methods.

[0219] The term “Chimeric Antigen Receptor” or alternatively a “CAR” refers to a recombinant polypeptide construct comprising at least an extracellular antigen binding domain, a transmembrane domain and a cytoplasmic signaling domain (also referred to herein as “an intracellular signaling domain”) comprising a functional signaling domain derived from a stimulatory molecule as defined below. In some embodiments, the domains in the CAR polypeptide construct are in the same polypeptide chain, e.g., comprise a chimeric fusion protein. In some embodiments, the domains in the CAR polypeptide construct are not contiguous with each other, e.g., are in different polypeptide chains, e.g., as provided in an RCAR as described herein.

[0220] In one aspect, the stimulatory molecule of the CAR is the zeta chain associated with the T cell receptor complex. In one aspect, the cytoplasmic signaling domain comprises a primary signaling domain (e.g., a primary signaling domain of CD3-zeta). In one aspect, the cytoplasmic signaling domain further comprises one or more functional signaling domains derived from at least one costimulatory molecule as defined below. In one aspect, the costimulatory molecule is chosen from 4-1BB (i.e., CD137), CD27, ICOS, and/or CD28. In one aspect, the CAR comprises a chimeric fusion protein comprising an extracellular antigen recognition domain, a transmembrane domain and an intracellular signaling domain comprising a functional signaling domain derived from a stimulatory molecule. In one aspect, the CAR comprises a chimeric fusion protein comprising an extracellular antigen recognition domain, a transmembrane domain and an intracellular signaling domain comprising a functional signaling domain derived from a co-stimulatory molecule and a functional signaling domain derived from a stimulatory molecule. In one aspect, the CAR comprises a chimeric fusion protein comprising an extracellular antigen recognition domain, a transmembrane domain and an intracellular signaling domain comprising two functional signaling domains derived from one or more co-stimulatory molecule(s) and a functional signaling domain derived from a stimulatory molecule. In one aspect, the CAR comprises a chimeric fusion protein comprising an extracellular antigen recognition domain, a transmembrane domain and an intracellular signaling domain comprising at least two functional signaling domains derived from one or more co-stimulatory molecule(s) and a functional signaling domain derived from a stimulatory molecule. In one aspect the CAR comprises an optional leader sequence at the amino-terminus (N-ter) of the CAR fusion protein. In one aspect, the CAR further comprises a leader sequence at the N-terminus of the extracellular antigen recognition domain, wherein the leader sequence is optionally cleaved from the antigen recognition domain (e.g., aa scFv) during cellular processing and localization of the CAR to the cellular membrane.

[0221] A CAR that comprises an antigen binding domain (e.g., a scFv, a single domain antibody, or TCR (e.g., a TCR alpha binding domain or TCR beta binding domain)) that specifically binds a specific tumor marker X, wherein X can be a tumor marker as described herein, is also referred to as XCAR. For example, a CAR that comprises an antigen binding domain that specifically binds CD123 is referred to as CD123 CAR or CAR123. For example, a CAR that comprises an antigen binding domain that specifically binds CD19 is referred to as CD19 CAR or CAR19. In some embodiments, the CAR comprises a CTL019 CAR as described herein. The CAR can be expressed in any cell, e.g., an immune effector cell as described herein (e.g., a T cell or an NK cell).

[0222] A therapy that comprises a CAR-expressing cell is referred to herein as a CAR-therapy. For example, a therapy that comprises a CD123 CAR-expressing cell, or a CD19 CAR is referred to herein as a CD123 CAR therapy or a CD19 CAR therapy, respectively.

[0223] The term “signaling domain” refers to the functional portion of a protein which acts by transmitting information within the cell to regulate cellular activity via defined signaling pathways by generating second messengers or functioning as effectors by responding to such messengers.

[0224] As used herein, the terms “alpha subunit of the IL-3 receptor,” “IL3Rα,” “CD123,” “IL3Rα chain” and “IL3Rα subunit” refer interchangeably to an antigenic determinant known to be detectable on leukemia precursor cells. The human and murine amino acid and nucleic acid sequences can be found in a public database, such as GenBank, UniProt and Swiss-Prot. For example, the amino acid sequence of human IL3Rα can be found at Accession No. NP 002174 and the nucleotide sequence encoding of the human IL3Rα can be found at Accession No. NM 005191. In one aspect the antigen-binding portion of the CAR recognizes and binds an epitope within the extracellular domain of the CD123 protein. In one aspect, the CD123 protein is expressed on a cancer cell. As used herein, “CD123” includes proteins comprising mutations, e.g., point mutations, fragments, insertions, deletions and splice variants of full length wild-type CD123.

[0225] As used herein, the term “CD19” refers to the Cluster of Differentiation 19 protein, which is an antigenic determinant detectable on leukemia precursor cells. The human and murine amino acid and nucleic acid sequences can be found in a public database, such as GenBank, UniProt and Swiss-Prot. For example, the amino acid sequence of human CD19 can be found as UniProt/Swiss-Prot Accession No. P15391 and the nucleotide sequence encoding of the human CD19 can be found at Accession No. NM_001178098. As used herein, “CD19” includes proteins comprising mutations, e.g., point mutations, fragments, insertions, deletions and splice variants of full length wild-type CD19. CD19 is expressed on most B lineage cancers, including, e.g., acute lymphoblastic leukaemia, chronic lymphocyte leukaemia and non-Hodgkin lymphoma. Other cells with express CD19 are provided below in the definition of “disease associated with expression of CD19.” It is also an early marker of B cell progenitors. See, e.g., Nicholson et al. Mol. Immun. 34 (16-17): 1157-1165 (1997). In one aspect the antigen-binding portion of the CART recognizes and binds an antigen within the extracellular domain of the CD19 protein. In one aspect, the CD19 protein is expressed on a cancer cell.

[0226] As used herein, the term “CD20” refers to an antigenic determinant known to be detectable on B cells. Human CD20 is also called membrane-spanning 4-domains, subfamily A, member 1 (MS4A1). The human and murine amino acid and nucleic acid sequences can be found in a public database, such as GenBank, UniProt and Swiss-Prot. For example, the amino acid sequence of human CD20 can be found at Accession Nos. NP_690605.1 and NP_068769.2, and the nucleotide sequence encoding transcript variants 1 and 3 of the human CD20 can be found at Accession No. NM_152866.2 and NM_021950.3, respectively. In one aspect the antigen-binding portion of the CAR recognizes and binds an antigen within the extracellular domain of the CD20 protein. In one aspect, the CD20 protein is expressed on a cancer cell.

[0227] As used herein, the term “CD22,” refers to an antigenic determinant known to be detectable on leukemia precursor cells. The human and murine amino acid and nucleic acid sequences can be found in a public database, such as GenBank, UniProt and Swiss-Prot. For example, the amino acid sequences of isoforms 1-5 human CD22 can be found at Accession Nos. NP 001762.2, NP 001172028.1, NP 001172029.1, NP 001172030.1, and NP 001265346.1, respectively, and the nucleotide sequence encoding variants 1-5 of the human CD22 can be found at Accession No. NM 001771.3, NM 001185099.1, NM 001185100.1, NM 001185101.1, and NM 001278417.1, respectively. In one aspect the antigen-binding portion of the CAR recognizes and binds an antigen within the extracellular domain of the CD22 protein. In one aspect, the CD22 protein is expressed on a cancer cell.

[0228] As used herein, the term “ROR1” refers to an antigenic determinant known to be detectable on leukemia precursor cells. The human and murine amino acid and nucleic acid sequences can be found in a public database, such as GenBank, UniProt and Swiss-Prot. For example, the amino acid sequences of isoforms land 2 precursors of human ROR1 can be found at Accession Nos. NP_005003.2 and NP_001077061.1, respectively, and the mRNA sequences encoding them can be found at Accession Nos. NM_005012.3 and NM_001083592.1, respectively. In one aspect the antigen-binding portion of the CAR recognizes and binds an antigen within the extracellular domain of the ROR1 protein. In one aspect, the ROR1 protein is expressed on a cancer cell.

[0229] As used herein, the term “CD33” refers to the Cluster of Differentiation 33 protein, which is an antigenic determinant detectable on leukemia cells as well on normal precursor cells of the myeloid lineage. The human and murine amino acid and nucleic acid sequences can be found in a public database, such as GenBank, UniProt and Swiss-Prot. For example, the amino acid sequence of human CD33 can be found as UniProt/Swiss-Prot Accession No. P20138 and the nucleotide sequence encoding of the human CD33 can be found at Accession No. NM_001772.3. In one aspect the antigen-binding portion of the CAR recognizes and binds an epitope within the extracellular domain of the CD33 protein or fragments thereof. In one aspect, the CD33 protein is expressed on a cancer cell. As used herein, “CD33” includes proteins comprising mutations, e.g., point mutations, fragments, insertions, deletions and splice variants of full length wild-type CD33.

[0230] As used herein, the term “BCMA” refers to B-cell maturation antigen. BCMA (also known as TNFRSF17, BCM or CD269) is a member of the tumor necrosis receptor (TNFR) family and is predominantly expressed on terminally differentiated B cells, e.g., memory B cells, and plasma cells. Its ligand is called B-cell activator of the TNF family (BAFF) and a proliferation inducing ligand (APRIL). BCMA is involved in mediating the survival of plasma cells for mataining long-term humoral immunity. The gene for BCMA is encoded on chromosome 16 producing a primary mRNA transcript of 994 nucleotides in length (NCBI accession NM_001192.2) that encodes a protein of 184 amino acids (NP_001183.2). A second antisense transcript derived from the BCMA locus has been described, which may play a role in regulating BCMA expression. (Laabi Y. et al., Nucleic Acids Res., 1994, 22:1147-1154). Additional transcript variants have been described with unknown significance (Smirnova A S et al. Mol Immunol., 2008, 45(4):1179-1183. A second isoform, also known as TV4, has been identified (Uniprot identifier Q02223-2). As used herein, “BCMA” includes proteins comprising mutations, e.g., point mutations, fragments, insertions, deletions and splice variants of full length wild-type BCMA.

[0231] As used herein, the term “CLL-1” refers to C-type lectin-like molecule-1, which is an antigenic determinant detectable on leukemia precursor cells and on normal immune cells. C-type lectin-like-1 (CLL-1) is also known as MICL, CLEC12A, CLEC-1, Dendritic Cell-Associated Lectin 1, and DCAL-2. The human and murine amino acid and nucleic acid sequences can be found in a public database, such as GenBank, UniProt and Swiss-Prot. For example, the amino acid sequence of human CLL-1 can be found as UniProt/Swiss-Prot Accession No. Q5QGZ9 and the nucleotide sequence encoding of the human CLL-1 can be found at Accession Nos. NM 001207010.1, NM 138337.5, NM 201623.3, and NM 201625.1. In one embodiment, the antigen-binding portion of the CAR recognizes and binds an epitope within the extracellular domain of the CLL-1 protein or a fragment thereof. In one embodiment, the CLL-1 protein is expressed on a cancer cell.

[0232] The term “EGFR” refers to any mammalian mature full-length epidermal growth factor receptor, including human and non-human forms. The 1186 amino acid human EGFR is described in Ullrich et al., Nature 309:418-425 (1984)) and GenBank Accession No. AF125253 and SwissProt Acc No P00533-2.

[0233] The term “EGFRvIII” refers to Epidermal growth factor receptor variant III. EGFRvIII is the most common variant of EGFR observed in human tumors but is rarely observed in normal tissue. This protein results from the in-frame deletion of exons 2-7 and the generation of a novel glycine residue at the junction of exons 1 and 8 within the extra-cellular domain of the EGFR, thereby creating a tumor specific epitope. EGFRvIII is expressed in 24% to 67% of GBM, but not in normal tissues. EGFRvIII is also known as type III mutant, delta-EGFR, EGFRde2-7, and EGFR and is described in U.S. Pat. Nos. 6,455,498, 6,127,126, 5,981,725, 5,814,317, 5,710,010, 5,401,828, and 5,212,290. Expression of EGFRvIII may result from a chromosomal deletion, and may also result from aberrant alternative splicing. See Sugawa et al., 1990, Proc. Natl. Acad. Sci. 87:8602-8606.

[0234] As used herein, the term “mesothelin” refers to the 40-kDa protein, mesothelin, which is anchored at the cell membrane by a glycosylphosphatidyl inositol (GPI) linkage and an amino-terminal 31-kDa shed fragment, called megkaryocyte potentiating factor (MPF). Both fragments contain N-glycosylation sites. The term also refers to a soluble splice variant of the 40-kDa carboxyl-terminal fragment also called “soluble mesothelin/MPF-related”. Preferably, the term refers to a human mesothelin of GenBank accession number AAH03512.1, and naturally cleaved portions thereof, e.g., as expressed on a cell membrane, e.g., a cancer cell membrane.

[0235] The term “antibody,” as used herein, refers to a protein, or polypeptide sequence derived from an immunoglobulin molecule which specifically binds with an antigen. Antibodies can be polyclonal or monoclonal, multiple or single chain, or intact immunoglobulins, and may be derived from natural sources or from recombinant sources. Antibodies can be tetramers of immunoglobulin molecules.

[0236] The term “antibody fragment” refers to at least one portion of an intact antibody, or recombinant variants thereof, and refers to the antigen binding domain, e.g., an antigenic determining variable region of an intact antibody, that is sufficient to confer recognition and specific binding of the antibody fragment to a target, such as an antigen. Examples of antibody fragments include, but are not limited to, Fab, Fab′, F(ab′)₂, and Fv fragments, scFv antibody fragments, linear antibodies, single domain antibodies such as sdAb (either VL or VH), camelid VHH domains, and multi-specific antibodies formed from antibody fragments such as a bivalent fragment comprising two Fab fragments linked by a disulfide brudge at the hinge region, and an isolated CDR or other epitope binding fragments of an antibody. An antigen binding fragment can also be incorporated into single domain antibodies, maxibodies, minibodies, nanobodies, intrabodies, diabodies, triabodies, tetrabodies, v-NAR and bis-scFv (see, e.g., Hollinger and Hudson, Nature Biotechnology 23:1126-1136, 2005). Antigen binding fragments can also be grafted into scaffolds based on polypeptides such as a fibronectin type III (Fn3)(see U.S. Pat. No. 6,703,199, which describes fibronectin polypeptide minibodies).

[0237] The term “scFv” refers to a fusion protein comprising at least one antibody fragment comprising a variable region of a light chain and at least one antibody fragment comprising a variable region of a heavy chain, wherein the light and heavy chain variable regions are contiguously linked via a short flexible polypeptide linker, and capable of being expressed as a single chain polypeptide, and wherein the scFv retains the specificity of the intact antibody from which it is derived. Unless specified, as used herein an scFv may have the VL and VH variable regions in either order, e.g., with respect to the N-terminal and C-terminal ends of the polypeptide, the scFv may comprise VL-linker-VH or may comprise VH-linker-VL.

[0238] The term “complementarity determining region” or “CDR,” as used herein, refers to the sequences of amino acids within antibody variable regions which confer antigen specificity and binding affinity. For example, in general, there are three CDRs in each heavy chain variable region (e.g., HCDR1, HCDR2, and HCDR3) and three CDRs in each light chain variable region (LCDR1, LCDR2, and LCDR3). The precise amino acid sequence boundaries of a given CDR can be determined using any of a number of well-known schemes, including those described by Kabat et al. (1991), “Sequences of Proteins of Immunological Interest,” 5th Ed. Public Health Service, National Institutes of Health, Bethesda, Md. (“Kabat” numbering scheme), Al-Lazikani et al., (1997) JMB 273, 927-948 (“Chothia” numbering scheme), or a combination thereof. Under the Kabat numbering scheme, in some embodiments, the CDR amino acid residues in the heavy chain variable domain (VH) are numbered 31-35 (HCDR1), 50-65 (HCDR2), and 95-102 (HCDR3); and the CDR amino acid residues in the light chain variable domain (VL) are numbered 24-34 (LCDR1), 50-56 (LCDR2), and 89-97 (LCDR3). Under the Chothia numbering scheme, in some embodiments, the CDR amino acids in the VH are numbered 26-32 (HCDR1), 52-56 (HCDR2), and 95-102 (HCDR3); and the CDR amino acid residues in the VL are numbered 26-32 (LCDR1), 50-52 (LCDR2), and 91-96 (LCDR3). In a combined Kabat and Chothia numbering scheme, in some embodiments, the CDRs correspond to the amino acid residues that are part of a Kabat CDR, a Chothia CDR, or both. For instance, in some embodiments, the CDRs correspond to amino acid residues 26-35 (HCDR1), 50-65 (HCDR2), and 95-102 (HCDR3) in a VH, e.g., a mammalian VH, e.g., a human VH; and amino acid residues 24-34 (LCDR1), 50-56 (LCDR2), and 89-97 (LCDR3) in a VL, e.g., a mammalian VL, e.g., a human VL.

[0239] The portion of the CAR composition of the invention comprising an antibody or antibody fragment thereof may exist in a variety of forms where the antigen binding domain is expressed as part of a contiguous polypeptide chain including, for example, a single domain antibody fragment (sdAb), a single chain antibody (scFv) and a humanized or human antibody (Harlow et al., 1999, In: Using Antibodies: A Laboratory Manual, Cold Spring Harbor Laboratory Press, NY; Harlow et al., 1989, In: Antibodies: A Laboratory Manual, Cold Spring Harbor, N.Y.; Houston et al., 1988, Proc. Natl. Acad. Sci. USA 85:5879-5883; Bird et al., 1988, Science 242:423-426). In one aspect, the antigen binding domain of a CAR composition of the invention comprises an antibody fragment. In a further aspect, the CAR comprises an antibody fragment that comprises a scFv.

[0240] As used herein, the term “binding domain” or “antibody molecule” (also referred to herein as “anti-target (e.g., CD123) binding domain”) refers to a protein, e.g., an immunoglobulin chain or fragment thereof, comprising at least one immunoglobulin variable domain sequence. The term “binding domain” or “antibody molecule” encompasses antibodies and antibody fragments. In an embodiment, an antibody molecule is a multispecific antibody molecule, e.g., it comprises a plurality of immunoglobulin variable domain sequences, wherein a first immunoglobulin variable domain sequence of the plurality has binding specificity for a first epitope and a second immunoglobulin variable domain sequence of the plurality has binding specificity for a second epitope. In an embodiment, a multispecific antibody molecule is a bispecific antibody molecule. A bispecific antibody has specificity for no more than two antigens. A bispecific antibody molecule is characterized by a first immunoglobulin variable domain sequence which has binding specificity for a first epitope and a second immunoglobulin variable domain sequence that has binding specificity for a second epitope.

[0241] The term “antibody heavy chain,” refers to the larger of the two types of polypeptide chains present in antibody molecules in their naturally occurring conformations, and which normally determines the class to which the antibody belongs.

[0242] The term “antibody light chain,” refers to the smaller of the two types of polypeptide chains present in antibody molecules in their naturally occurring conformations. Kappa (κ) and lambda (λ) light chains refer to the two major antibody light chain isotypes.

[0243] The term “recombinant antibody” refers to an antibody which is generated using recombinant DNA technology, such as, for example, an antibody expressed by a bacteriophage or yeast expression system. The term should also be construed to mean an antibody which has been generated by the synthesis of a DNA molecule encoding the antibody and which DNA molecule expresses an antibody protein, or an amino acid sequence specifying the antibody, wherein the DNA or amino acid sequence has been obtained using recombinant DNA or amino acid sequence technology which is available and well known in the art.

[0244] The term “antigen” or “Ag” refers to a molecule that provokes an immune response. This immune response may involve either antibody production, or the activation of specific immunologically-competent cells, or both. The skilled artisan will understand that any macromolecule, including virtually all proteins or peptides, can serve as an antigen. Furthermore, antigens can be derived from recombinant or genomic DNA. A skilled artisan will understand that any DNA, which comprises a nucleotide sequences or a partial nucleotide sequence encoding a protein that elicits an immune response therefore encodes an “antigen” as that term is used herein. Furthermore, one skilled in the art will understand that an antigen need not be encoded solely by a full length nucleotide sequence of a gene. It is readily apparent that the present invention includes, but is not limited to, the use of partial nucleotide sequences of more than one gene and that these nucleotide sequences are arranged in various combinations to encode polypeptides that elicit the desired immune response. Moreover, a skilled artisan will understand that an antigen need not be encoded by a “gene” at all. It is readily apparent that an antigen can be generated synthesized or can be derived from a biological sample, or might be macromolecule besides a polypeptide. Such a biological sample can include, but is not limited to a tissue sample, a tumor sample, a cell or a fluid with other biological components.

[0245] The term “anti-tumor effect” refers to a biological effect which can be manifested by various means, including but not limited to, e.g., a decrease in tumor volume, a decrease in the number of tumor cells, a decrease in the number of metastases, an increase in life expectancy, decrease in tumor cell proliferation, decrease in tumor cell survival, or amelioration of various physiological symptoms associated with the cancerous condition. An “anti-tumor effect” can also be manifested by the ability of the peptides, polynucleotides, cells and antibodies of the invention in prevention of the occurrence of tumor in the first place.

[0246] The term “anti-cancer effect” refers to a biological effect which can be manifested by various means, including but not limited to, e.g., a decrease in tumor volume, a decrease in the number of cancer cells, a decrease in the number of metastases, an increase in life expectancy, decrease in cancer cell proliferation, decrease in cancer cell survival, or amelioration of various physiological symptoms associated with the cancerous condition. An “anti-cancer effect” can also be manifested by the ability of the peptides, polynucleotides, cells and antibodies in prevention of the occurrence of cancer in the first place.

[0247] The term “anti-tumor effect” refers to a biological effect which can be manifested by various means, including but not limited to, e.g., a decrease in tumor volume, a decrease in the number of tumor cells, a decrease in tumor cell proliferation, or a decrease in tumor cell survival.

[0248] The term “autologous” refers to any material derived from the same individual to whom it is later to be re-introduced into the individual.

[0249] The term “allogeneic” refers to any material derived from a different animal of the same species as the individual to whom the material is introduced. Two or more individuals are said to be allogeneic to one another when the genes at one or more loci are not identical. In some aspects, allogeneic material from individuals of the same species may be sufficiently unlike genetically to interact antigenically.

[0250] The term “xenogeneic” refers to a graft derived from an animal of a different species. The term “apheresis” as used herein refers to the art-recognized extracorporeal process by which the blood of a donor or patient is removed from the donor or patient and passed through an apparatus that separates out selected particular constituent(s) and returns the remainder to the circulation of the donor or patient, e.g., by retransfusion. Thus, in the context of “an apheresis sample” refers to a sample obtained using apheresis.

[0251] The term “combination” refers to either a fixed combination in one dosage unit form, or a combined administration where a compound of the present invention and a combination partner (e.g. another drug as explained below, also referred to as “therapeutic agent” or “co-agent”) may be administered independently at the same time or separately within time intervals, especially where these time intervals allow that the combination partners show a cooperative, e.g. synergistic effect. The single components may be packaged in a kit or separately. One or both of the components (e.g., powders or liquids) may be reconstituted or diluted to a desired dose prior to administration. The terms “co-administration” or “combined administration” or the like as utilized herein are meant to encompass administration of the selected combination partner to a single subject in need thereof (e.g. a patient), and are intended to include treatment regimens in which the agents are not necessarily administered by the same route of administration or at the same time. The term “pharmaceutical combination” as used herein means a product that results from the mixing or combining of more than one active ingredient and includes both fixed and non-fixed combinations of the active ingredients. The term “fixed combination” means that the active ingredients, e.g. a compound of the present invention and a combination partner, are both administered to a patient simultaneously in the form of a single entity or dosage. The term “non-fixed combination” means that the active ingredients, e.g. a compound of the present invention and a combination partner, are both administered to a patient as separate entities either simultaneously, concurrently or sequentially with no specific time limits, wherein such administration provides therapeutically effective levels of the two compounds in the body of the patient. The latter also applies to cocktail therapy, e.g. the administration of three or more active ingredients.

[0252] The term “cancer” refers to a disease characterized by the rapid and uncontrolled growth of aberrant cells. Cancer cells can spread locally or through the bloodstream and lymphatic system to other parts of the body. Examples of various cancers are described herein and include but are not limited to, breast cancer, prostate cancer, ovarian cancer, cervical cancer, skin cancer, pancreatic cancer, colorectal cancer, renal cancer, liver cancer, brain cancer, lymphoma, leukemia, lung cancer and the like. The terms “tumor” and “cancer” are used interchangeably herein, e.g., both terms encompass solid and liquid, e.g., diffuse or circulating, tumors. As used herein, the term “cancer” or “tumor” includes premalignant, as well as malignant cancers and tumors.

[0253] “Derived from” as that term is used herein, indicates a relationship between a first and a second molecule. It generally refers to structural similarity between the first molecule and a second molecule and does not connotate or include a process or source limitation on a first molecule that is derived from a second molecule. For example, in the case of an intracellular signaling domain that is derived from a CD3zeta molecule, the intracellular signaling domain retains sufficient CD3zeta structure such that is has the required function, namely, the ability to generate a signal under the appropriate conditions. It does not connotate or include a limitation to a particular process of producing the intracellular signaling domain, e.g., it does not mean that, to provide the intracellular signaling domain, one must start with a CD3zeta sequence and delete unwanted sequence, or impose mutations, to arrive at the intracellular signaling domain.

[0254] The phrase “disease associated with expression of a B-cell antigen” includes, but is not limited to, a disease associated with expression of one or more of CD19, CD20, CD22 or ROR1, or a condition associated with cells which express, or at any time expressed, one or more of CD19, CD20, CD22 or ROR1, including, e.g., proliferative diseases such as a cancer or malignancy or a precancerous condition such as a myelodysplasia, a myelodysplastic syndrome or a preleukemia; or a noncancer related indication associated with cells which express one or more of CD19, CD20, CD22 or ROR1. For the avoidance of doubt, a disease associated with expression of the B-cell antigen may include a condition associated with cells which do not presently express the B-cell antigen, e.g., because the antigen expression has been downregulated, e.g., due to treatment with a molecule targeting the B-cell antigen, e.g., a B-cell targeting CAR, but which at one time expressed the antigen. The phrase “disease associated with expression of a B-cell antigen” includes a disease associated with expression of CD19, as described herein.

[0255] The phrase “disease associated with expression of CD19” includes, but is not limited to, a disease associated with expression of CD19 or condition associated with cells which express, or at any time expressed, CD19 including, e.g., proliferative diseases such as a cancer or malignancy or a precancerous condition such as a myelodysplasia, a myelodysplastic syndrome or a preleukemia; or a noncancer related indication associated with cells which express CD19. For the avoidance of doubt, a disease associated with expression of CD19 may include a condition associated with cells which do not presently express CD19, e.g., because CD19 expression has been downregulated, e.g., due to treatment with a molecule targeting CD19, e.g., a CD19 CAR, but which at one time expressed CD19. In one aspect, a cancer associated with expression of CD19 is a hematological cancer. In one aspect, the hematolical cancer is a leukemia or a lymphoma. In one aspect, a cancer associated with expression of CD19 includes cancers and malignancies including, but not limited to, e.g., one or more acute leukemias including but not limited to, e.g., B-cell acute Lymphoid Leukemia (BALL), T-cell acute Lymphoid Leukemia (TALL), acute lymphoid leukemia (ALL); one or more chronic leukemias including but not limited to, e.g., chronic myelogenous leukemia (CML), Chronic Lymphoid Leukemia (CLL). Additional cancers or hematologic conditions associated with expression of CD19 comprise, but are not limited to, e.g., B cell prolymphocytic leukemia, blastic plasmacytoid dendritic cell neoplasm, Burkitt's lymphoma, diffuse large B cell lymphoma, Follicular lymphoma, Hairy cell leukemia, small cell- or a large cell-follicular lymphoma, malignant lymphoproliferative conditions, MALT lymphoma, mantle cell lymphoma (MCL), Marginal zone lymphoma, multiple myeloma, myelodysplasia and myelodysplastic syndrome, non-Hodgkin lymphoma, Hodgkin lymphoma, plasmablastic lymphoma, plasmacytoid dendritic cell neoplasm, Waldenstrom macroglobulinemia, and “preleukemia” which are a diverse collection of hematological conditions united by ineffective production (or dysplasia) of myeloid blood cells, and the like. Further diseases associated with expression of CD19 expression include, but not limited to, e.g., atypical and/or non-classical cancers, malignancies, precancerous conditions or proliferative diseases associated with expression of CD19. Non-cancer related indications associated with expression of CD19 include, but are not limited to, e.g., autoimmune disease, (e.g., lupus), inflammatory disorders (allergy and asthma) and transplantation. In some embodiments, the tumor antigen-expressing cells express, or at any time expressed, mRNA encoding the tumor antigen. In an embodiment, the tumor antigen-expressing cells produce the tumor antigen protein (e.g., wild-type or mutant), and the tumor antigen protein may be present at normal levels or reduced levels. In an embodiment, the tumor antigen-expressing cells produced detectable levels of a tumor antigen protein at one point, and subsequently produced substantially no detectable tumor antigen protein.

[0256] The phrase “disease associated with expression of CD123” as used herein includes but is not limited to, a disease associated with expression of CD123 or condition associated with a cell which expresses CD123 (e.g., wild-type or mutant CD123) including, e.g., a proliferative disease such as a cancer or malignancy; a precancerous condition such as a myelodysplasia, a myelodysplastic syndrome or a preleukemia; or a non-cancer related indication associated with a cell which expresses CD123 (e.g., wild-type or mutant CD123). In one aspect, a cancer associated with expression of CD123 (e.g., wild-type or mutant CD123) is a hematological cancer. In one aspect, the disease includes AML, ALL, hairy cell leukemia, Prolymphocytic leukemia, Chronic myeloid leukemia (CML), Hodgkin lymphoma, Blastic plasmacytoid dendritic cell neoplasm, lymphoblastic B-cell leukemia (B-cell acute lymphoid leukemia, BALL), acute lymphoblastic T-cell leukemia (T-cell acute lymphoid leukemia (TALL); myelodysplastic syndrome; a myeloproliferative neoplasm; a histiocytic disorder (e.g., a mast cell disorder or a blastic plasmacytoid dendritic cell neoplasm); a mast cell disorder, e.g., systemic mastocytosis or mast cell leukemia, and the like. Further disease associated with expression of CD123 expression include, but are not limited to, e.g., atypical and/or non-classical cancers, malignancies, precancerous conditions or proliferative diseases associated with expression of CD123. Non-cancer related indications associated with expression of CD123 may also be included.

[0257] The phrase “disease associated with expression of CD33” as used herein includes but is not limited to, a disease associated with a cell which expresses CD33 (e.g., wild-type or mutant CD33) or condition associated with a cell which expresses CD33 (e.g., wild-type or mutant CD33) including, e.g., a proliferative disease such as a cancer or malignancy or a precancerous condition such as a myelodysplasia, a myelodysplastic syndrome or a preleukemia; or a noncancer related indication associated with a cell which expresses CD33 (e.g., wild-type or mutant CD33). For the avoidance of doubt, a disease associated with expression of CD33 may include a condition associated with a cell which do not presently express CD33, e.g., because CD33 expression has been downregulated, e.g., due to treatment with a molecule targeting CD33, e.g., a CD33 inhibitor described herein, but which at one time expressed CD33. In one aspect, a cancer associated with expression of CD33 (e.g., wild-type or mutant CD33) is a hematological cancer. In one aspect, a hematological cancer includes but is not limited to acute myeloid leukemia (AML), myelodysplasia and myelodysplastic syndrome, myelofibrosis and myeloproliferative neoplasms, acute lymphoid leukemia (ALL), hairy cell leukemia, Prolymphocytic leukemia, chronic myeloid leukemia (CML), Blastic plasmacytoid dendritic cell neoplasm, and the like. Further disease associated with expression of CD33 (e.g., wild-type or mutant CD33) expression include, but are not limited to, e.g., atypical and/or non-classical cancers, malignancies, precancerous conditions or proliferative diseases associated with expression of CD33 (e.g., wild-type or mutant CD33). Non-cancer related indications associated with expression of CD33 (e.g., wild-type or mutant CD33) may also be included. In embodiments, a non-cancer related indication associated with expression of CD33 includes but is not limited to, e.g., autoimmune disease, (e.g., lupus), inflammatory disorders (allergy and asthma) and transplantation. In some embodiments, the tumor antigen-expressing cell expresses, or at any time expressed, mRNA encoding the tumor antigen. In an embodiment, the tumor antigen-expressing cell produces the tumor antigen protein (e.g., wild-type or mutant), and the tumor antigen protein may be present at normal levels or reduced levels. In an embodiment, the tumor antigen-expressing cell produced detectable levels of a tumor antigen protein at one point, and subsequently produced substantially no detectable tumor antigen protein.

[0258] The phrase “disease associated with expression of BCMA” includes, but is not limited to, a disease associated with a cell which expresses BCMA (e.g., wild-type or mutant BCMA) or condition associated with a cell which expresses BCMA (e.g., wild-type or mutant BCMA) including, e.g., proliferative diseases such as a cancer or malignancy or a precancerous condition such as a myelodysplasia, a myelodysplastic syndrome or a preleukemia; or a noncancer related indication associated with a cell which expresses BCMA (e.g., wild-type or mutant BCMA). For the avoidance of doubt, a disease associated with expression of BCMA may include a condition associated with a cell which does not presently express BCMA, e.g., because BCMA expression has been downregulated, e.g., due to treatment with a molecule targeting BCMA, e.g., a BCMA inhibitor described herein, but which at one time expressed BCMA. In one aspect, a cancer associated with expression of BCMA (e.g., wild-type or mutant BCMA) is a hematological cancer. In one aspect, the hematogical cancer is a leukemia or a lymphoma. In one aspect, a cancer associated with expression of BCMA (e.g., wild-type or mutant BCMA) is a malignancy of differentiated plasma B cells. In one aspect, a cancer associated with expression of BCMA (e.g., wild-type or mutant BCMA) includes cancers and malignancies including, but not limited to, e.g., one or more acute leukemias including but not limited to, e.g., B-cell acute Lymphoid Leukemia (“BALL”), T-cell acute Lymphoid Leukemia (“TALL”), acute lymphoid leukemia (ALL); one or more chronic leukemias including but not limited to, e.g., chronic myelogenous leukemia (CML), Chronic Lymphoid Leukemia (CLL).

[0259] Additional cancers or hematologic conditions associated with expression of BMCA (e.g., wild-type or mutant BCMA) comprise, but are not limited to, e.g., B cell prolymphocytic leukemia, blastic plasmacytoid dendritic cell neoplasm, Burkitt's lymphoma, diffuse large B cell lymphoma, Follicular lymphoma, Hairy cell leukemia, small cell- or a large cell-follicular lymphoma, malignant lymphoproliferative conditions, MALT lymphoma, mantle cell lymphoma, Marginal zone lymphoma, multiple myeloma, myelodysplasia and myelodysplastic syndrome, non-Hodgkin's lymphoma, plasmablastic lymphoma, plasmacytoid dendritic cell neoplasm, Waldenstrom macroglobulinemia, and “preleukemia” which are a diverse collection of hematological conditions united by ineffective production (or dysplasia) of myeloid blood cells, and the like. In some embodiments, the cancer is multiple myeloma, Hodgkin's lymphoma, non-Hodgkin's lymphoma, or glioblastoma. In embodiments, a disease associated with expression of BCMA includes a plasma cell proliferative disorder, e.g., asymptomatic myeloma (smoldering multiple myeloma or indolent myeloma), monoclonal gammapathy of undetermined significance (MGUS), Waldenstrom's macroglobulinemia, plasmacytomas (e.g., plasma cell dyscrasia, solitary myeloma, solitary plasmacytoma, extramedullary plasmacytoma, and multiple plasmacytoma), systemic amyloid light chain amyloidosis, and POEMS syndrome (also known as Crow-Fukase syndrome, Takatsuki disease, and PEP syndrome). Further diseases associated with expression of BCMA (e.g., wild-type or mutant BCMA) expression include, but not limited to, e.g., atypical and/or non-classical cancers, malignancies, precancerous conditions or proliferative diseases associated with expression of BCMA (e.g., wild-type or mutant BCMA), e.g., a cancer described herein, e.g., a prostate cancer (e.g., castrate-resistant or therapy-resistant prostate cancer, or metastatic prostate cancer), pancreatic cancer, or lung cancer.

[0260] Non-cancer related conditions that are associated with BCMA (e.g., wild-type or mutant BCMA) include viral infections; e.g., HIV, fungal invections, e.g., C. neoformans; autoimmune disease; e.g. rheumatoid arthritis, system lupus erythematosus (SLE or lupus), pemphigus vulgaris, and Sjogren's syndrome; inflammatory bowel disease, ulcerative colitis; transplant-related allospecific immunity disorders related to mucosal immunity; and unwanted immune responses towards biologics (e.g., Factor VIII) where humoral immunity is important. In embodiments, a non-cancer related indication associated with expression of BCMA includes but is not limited to, e.g., autoimmune disease, (e.g., lupus), inflammatory disorders (allergy and asthma) and transplantation. In some embodiments, the tumor antigen-expressing cell expresses, or at any time expressed, mRNA encoding the tumor antigen. In an embodiment, the tumor antigen-expressing cell produces the tumor antigen protein (e.g., wild-type or mutant), and the tumor antigen protein may be present at normal levels or reduced levels. In an embodiment, the tumor antigen-expressing cell produced detectable levels of a tumor antigen protein at one point, and subsequently produced substantially no detectable tumor antigen protein.

[0261] The phrase “disease associated with expression of CLL-1” includes, but is not limited to, a disease associated with a cell which expresses CLL-1 or condition associated with a cell which expresses CLL-1 including, e.g., proliferative diseases such as a cancer or malignancy or a precancerous condition such as a myelodysplasia, a myelodysplastic syndrome or a preleukemia; or a noncancer related indication associated with a cell which expresses CLL-1 (e.g., wild-type or mutant CLL-1). For the avoidance of doubt, a disease associated with expression of CLL-1 may include a condition associated with a cell which do not presently express CLL-1, e.g., because CLL-1 expression has been downregulated, e.g., due to treatment with a molecule targeting CLL-1, e.g., a CLL-1 inhibitor described herein, but which at one time expressed CLL-1. In one aspect, a cancer associated with expression of CLL-1 is a hematological cancer. In one aspect, a hematological cancer includes but is not limited to leukemia (such as acute myelogenous leukemia, chronic myelogenous leukemia, acute lymphoid leukemia, chronic lymphoid leukemia and myelodysplastic syndrome) and malignant lymphoproliferative conditions, including lymphoma (such as multiple myeloma, non-Hodgkin's lymphoma, Burkitt's lymphoma, and small cell- and large cell-follicular lymphoma). Further diseases associated with expression of CLL-1 expression include, but not limited to, e.g., atypical and/or non-classical cancers, malignancies, precancerous conditions or proliferative diseases associated with expression of CLL-1. Non-cancer related indications associated with expression of CLL-1 may also be included. In some embodiments, the tumor antigen-expressing cell expresses, or at any time expressed, mRNA encoding the tumor antigen. In an embodiment, the tumor antigen-expressing cell produces the tumor antigen protein (e.g., wild-type or mutant), and the tumor antigen protein may be present at normal levels or reduced levels. In an embodiment, the tumor antigen-expressing cell produced detectable levels of a tumor antigen protein at one point, and subsequently produced substantially no detectable tumor antigen protein.

[0262] The term “disease associated with expression of EGFRvIII” as used herein includes, but is not limited to, a disease associated with expression of EGFRvIII or condition associated with cells which express EGFRvIII including, tumor cells of various cancers such as, e.g., glioblastoma (including glioblastoma stem cells); breast, ovarian, and non-small cell lung carcinomas; head and neck squamous cell carcinoma; medulloblastoma, colorectal cancer, prostate cancer, and bladder carcinoma. Without being bound to a particular theory or mechanism, it is believed that by eliciting an antigen-specific response against EGFRvIII, the CARs disclosed herein provide for one or more of the following: targeting and destroying EGFRvIII-expressing tumor cells, reducing or eliminating tumors, facilitating infiltration of immune cells to the tumor site, and enhancing/extending anti-tumor responses. Because EGFRvIII is not expressed at detectable levels in normal (i.e., non-cancerous) tissue, it is contemplated that the inventive CARs advantageously substantially avoid targeting/destroying normal tissues and cells.

[0263] The phrase “disease associated with expression of mesothelin” as used herein includes, but is not limited to, a disease associated with expression of mesothelin or condition associated with cells which express mesothelin including, e.g., proliferative diseases such as a cancer or malignancy or a precancerous condition such as a mesothelial hyperplasia; or a noncancer related indication associated with cells which express mesothelin. Examples of various cancers that express mesothelin include but are not limited to, mesothelioma, ovarian cancer, pancreatic cancer, and the like.

[0264] In some embodiments, the tumor antigen (e.g., CD123- or CD19-)-expressing cell expresses, or at any time expressed, mRNA encoding the tumor antigen. In an embodiment, the tumor antigen (e.g., CD123- or CD19-)-expressing cell produces the tumor antigen protein (e.g., wild-type or mutant), and the tumor antigen protein may be present at normal levels or reduced levels. In an embodiment, the tumor antigen (e.g., CD123- or CD19-)-expressing cell produced detectable levels of a tumor antigen protein at one point, and subsequently produced substantially no detectable tumor antigen protein.

[0265] The term “conservative sequence modifications” refers to amino acid modifications that do not significantly affect or alter the binding characteristics of the antibody or antibody fragment containing the amino acid sequence. Such conservative modifications include amino acid substitutions, additions and deletions. Modifications can be introduced into an antibody or antibody fragment of the invention by standard techniques known in the art, such as site-directed mutagenesis and PCR-mediated mutagenesis. Conservative substitutions are ones in which the amino acid residue is replaced with an amino acid residue having a similar side chain. Families of amino acid residues having similar side chains have been defined in the art. These families include amino acids with basic side chains (e.g., lysine, arginine, histidine), acidic side chains (e.g., aspartic acid, glutamic acid), uncharged polar side chains (e.g., glycine, asparagine, glutamine, serine, threonine, tyrosine, cysteine, tryptophan), nonpolar side chains (e.g., alanine, valine, leucine, isoleucine, proline, phenylalanine, methionine), beta-branched side chains (e.g., threonine, valine, isoleucine) and aromatic side chains (e.g., tyrosine, phenylalanine, tryptophan, histidine). Thus, one or more amino acid residues within a CAR of the invention can be replaced with other amino acid residues from the same side chain family and the altered CAR can be tested using the functional assays described herein.

[0266] The term “stimulation,” refers to a primary response induced by binding of a stimulatory molecule (e.g., a TCR/CD3 complex) with its cognate ligand thereby mediating a signal transduction event, such as, but not limited to, signal transduction via the TCR/CD3 complex. Stimulation can mediate altered expression of certain molecules, such as downregulation of TGF-β, and/or reorganization of cytoskeletal structures, and the like.

[0267] The term “stimulatory molecule,” refers to a molecule expressed by a T cell that provides the primary cytoplasmic signaling sequence(s) that regulate primary activation of the TCR complex in a stimulatory way for at least some aspect of the T cell signaling pathway. In one aspect, the primary signal is initiated by, for instance, binding of a TCR/CD3 complex with an MHC molecule loaded with peptide, and which leads to mediation of a T cell response, including, but not limited to, proliferation, activation, differentiation, and the like. A primary cytoplasmic signaling sequence (also referred to as a “primary signaling domain”) that acts in a stimulatory manner may contain a signaling motif which is known as immunoreceptor tyrosine-based activation motif or ITAM. Examples of an ITAM containing primary cytoplasmic signaling sequence that is of particular use in the invention includes, but is not limited to, those derived from TCR zeta, FcR gamma, FcR beta, CD3 gamma, CD3 delta, CD3 epsilon, CD5, CD22, CD79a, CD79b, CD278 (also known as “ICOS”), FcεRI, CD66d, DAP10 and DAP12. In a specific CAR of the invention, the intracellular signaling domain in any one or more CARS of the invention comprises an intracellular signaling sequence, e.g., a primary signaling sequence of CD3-zeta. In a specific CAR of the invention, the primary signaling sequence of CD3-zeta is the sequence provided as SEQ ID NO:9, or the equivalent residues from a non-human species, e.g., mouse, rodent, monkey, ape and the like. In a specific CAR of the invention, the primary signaling sequence of CD3-zeta is the sequence as provided in SEQ ID NO:10, or the equivalent residues from a non-human species, e.g., mouse, rodent, monkey, ape and the like.

[0268] The term “antigen presenting cell” or “APC” refers to an immune system cell such as an accessory cell (e.g., a B-cell, a dendritic cell, and the like) that displays a foreign antigen complexed with major histocompatibility complexes (MHC's) on its surface. T-cells may recognize these complexes using their T-cell receptors (TCRs). APCs process antigens and present them to T-cells.

[0269] An “intracellular signaling domain,” as the term is used herein, refers to an intracellular portion of a molecule. The intracellular signaling domain can generate a signal that promotes an immune effector function of the CAR containing cell, e.g., a CART cell or CAR-expressing NK cell. Examples of immune effector function, e.g., in a CART cell or CAR-expressing NK cell, include cytolytic activity and helper activity, including the secretion of cytokines. In embodiments, the intracellular signal domain transduces the effector function signal and directs the cell to perform a specialized function. While the entire intracellular signaling domain can be employed, in many cases it is not necessary to use the entire chain. To the extent that a truncated portion of the intracellular signaling domain is used, such truncated portion may be used in place of the intact chain as long as it transduces the effector function signal. The term intracellular signaling domain is thus meant to include any truncated portion of the intracellular signaling domain sufficient to transduce the effector function signal.

[0270] In an embodiment, the intracellular signaling domain can comprise a primary intracellular signaling domain. Exemplary primary intracellular signaling domains include those derived from the molecules responsible for primary stimulation, or antigen dependent simulation. In an embodiment, the intracellular signaling domain can comprise a costimulatory intracellular domain. Exemplary costimulatory intracellular signaling domains include those derived from molecules responsible for costimulatory signals, or antigen independent stimulation. For example, in the case of a CAR-expressing immune effector cell, e.g., CART cell or CAR-expressing NK cell, a primary intracellular signaling domain can comprise a cytoplasmic sequence of a T cell receptor, and a costimulatory intracellular signaling domain can comprise cytoplasmic sequence from co-receptor or costimulatory molecule.

[0271] A primary intracellular signaling domain can comprise a signaling motif which is known as an immunoreceptor tyrosine-based activation motif or ITAM. Examples of ITAM containing primary cytoplasmic signaling sequences include, but are not limited to, those derived from CD3 zeta, FcR gamma, FcR beta, CD3 gamma, CD3 delta, CD3 epsilon, CD5, CD22, CD79a, CD79b, CD278 (“ICOS”), FcεRI, CD66d, DAP10, and DAP12.

[0272] The term “zeta” or alternatively “zeta chain”, “CD3-zeta” or “TCR-zeta” is defined as the protein provided as GenBan Acc. No. BAG36664.1, or the equivalent residues from a non-human species, e.g., mouse, rodent, monkey, ape and the like, and a “zeta stimulatory domain” or alternatively a “CD3-zeta stimulatory domain” or a “TCR-zeta stimulatory domain” is defined as the amino acid residues from the cytoplasmic domain of the zeta chain that are sufficient to functionally transmit an initial signal necessary for T cell activation. In one aspect the cytoplasmic domain of zeta comprises residues 52 through 164 of GenBank Acc. No. BAG36664.1 or the equivalent residues from a non-human species, e.g., mouse, rodent, monkey, ape and the like, that are functional orthologs thereof. In one aspect, the “zeta stimulatory domain” or a “CD3-zeta stimulatory domain” is the sequence provided as SEQ ID NO:9. In one aspect, the “zeta stimulatory domain” or a “CD3-zeta stimulatory domain” is the sequence provided as SEQ ID NO:10.

[0273] The term “costimulatory molecule” refers to the cognate binding partner on a T cell that specifically binds with a costimulatory ligand, thereby mediating a costimulatory response by the T cell, such as, but not limited to, proliferation. Costimulatory molecules are cell surface molecules other than antigen receptors or their ligands that are required for an efficient immune response. Costimulatory molecules include, but are not limited to an a MHC class I molecule, TNF receptor proteins, Immunoglobulin-like proteins, cytokine receptors, integrins, signaling lymphocytic activation molecules (SLAM proteins), activating NK cell receptors, BTLA, a Toll ligand receptor, OX40, CD2, CD7, CD27, CD28, CD30, CD40, CDS, ICAM-1, LFA-1 (CD11a/CD18), 4-1BB (CD137), B7-H3, CDS, ICAM-1, ICOS (CD278), GITR, BAFFR, LIGHT, HVEM (LIGHTR), KIRDS2, SLAMF7, NKp80 (KLRF1), NKp44, NKp30, NKp46, CD19, CD4, CD8alpha, CD8beta, IL2R beta, IL2R gamma, IL7R alpha, ITGA4, VLA1, CD49a, ITGA4, IA4, CD49D, ITGA6, VLA-6, CD49f, ITGAD, CD11d, ITGAE, CD103, ITGAL, CD11a, LFA-1, ITGAM, CD11b, ITGAX, CD11c, ITGB1, CD29, ITGB2, CD18, LFA-1, ITGB7, NKG2D, NKG2C, TNFR2, TRANCE/RANKL, DNAM1 (CD226), SLAMF4 (CD244, 2B4), CD84, CD96 (Tactile), CEACAM1, CRTAM, Ly9 (CD229), CD160 (BY55), PSGL1, CD100 (SEMA4D), CD69, SLAMF6 (NTB-A, Ly108), SLAM (SLAMF1, CD150, IPO-3), BLAME (SLAMF8), SELPLG (CD162), LTBR, LAT, GADS, SLP-76, PAG/Cbp, CD19a, and a ligand that specifically binds with CD83.

[0274] A costimulatory intracellular signaling domain refers to the intracellular portion of a costimulatory molecule. The intracellular signaling domain can comprise the entire intracellular portion, or the entire native intracellular signaling domain, of the molecule from which it is derived, or a functional fragment thereof.

[0275] The term “4-1BB” refers to a member of the TNFR superfamily with an amino acid sequence provided as GenBank Acc. No. AAA62478.2, or the equivalent residues from a non-human species, e.g., mouse, rodent, monkey, ape and the like; and a “4-1BB costimulatory domain” is defined as amino acid residues 214-255 of GenBank accno. AAA62478.2, or the equivalent residues from a non-human species, e.g., mouse, rodent, monkey, ape and the like. In one aspect, the “4-1BB costimulatory domain” is the sequence provided as SEQ ID NO:7 or the equivalent residues from a non-human species, e.g., mouse, rodent, monkey, ape and the like.

[0276] “Immune effector cell,” as that term is used herein, refers to a cell that is involved in an immune response, e.g., in the promotion of an immune effector response. Examples of immune effector cells include T cells, e.g., alpha/beta T cells and gamma/delta T cells, B cells, natural killer (NK) cells, natural killer T (NKT) cells, mast cells, and myeloic-derived phagocytes.

[0277] “Immune effector function or immune effector response,” as that term is used herein, refers to function or response, e.g., of an immune effector cell, that enhances or promotes an immune attack of a target cell. E.g., an immune effector function or response refers a property of a T or NK cell that promotes killing or the inhibition of growth or proliferation, of a target cell. In the case of a T cell, primary stimulation and co-stimulation are examples of immune effector function or response.

[0278] The term “effector function” refers to a specialized function of a cell. Effector function of a T cell, for example, may be cytolytic activity or helper activity including the secretion of cytokines.

[0279] The term “encoding” refers to the inherent property of specific sequences of nucleotides in a polynucleotide, such as a gene, a cDNA, or an mRNA, to serve as templates for synthesis of other polymers and macromolecules in biological processes having either a defined sequence of nucleotides (e.g., rRNA, tRNA and mRNA) or a defined sequence of amino acids and the biological properties resulting therefrom. Thus, a gene, cDNA, or RNA, encodes a protein if transcription and translation of mRNA corresponding to that gene produces the protein in a cell or other biological system. Both the coding strand, the nucleotide sequence of which is identical to the mRNA sequence and is usually provided in sequence listings, and the non-coding strand, used as the template for transcription of a gene or cDNA, can be referred to as encoding the protein or other product of that gene or cDNA.

[0280] Unless otherwise specified, a “nucleotide sequence encoding an amino acid sequence” includes all nucleotide sequences that are degenerate versions of each other and that encode the same amino acid sequence. The phrase nucleotide sequence that encodes a protein or a RNA may also include introns to the extent that the nucleotide sequence encoding the protein may in some version contain an intron(s).

[0281] The term “effective amount” or “therapeutically effective amount” are used interchangeably herein, and refer to an amount of a compound, formulation, material, or composition, as described herein effective to achieve a particular biological result.

[0282] The term “endogenous” refers to any material from or produced inside an organism, cell, tissue or system.

[0283] The term “exogenous” refers to any material introduced from or produced outside an organism, cell, tissue or system.

[0284] The term “expression” refers to the transcription and/or translation of a particular nucleotide sequence driven by a promoter.

[0285] The term “transfer vector” refers to a composition of matter which comprises an isolated nucleic acid and which can be used to deliver the isolated nucleic acid to the interior of a cell. Numerous vectors are known in the art including, but not limited to, linear polynucleotides, polynucleotides associated with ionic or amphiphilic compounds, plasmids, and viruses. Thus, the term “transfer vector” includes an autonomously replicating plasmid or a virus. The term should also be construed to further include non-plasmid and non-viral compounds which facilitate transfer of nucleic acid into cells, such as, for example, a polylysine compound, liposome, and the like. Examples of viral transfer vectors include, but are not limited to, adenoviral vectors, adeno-associated virus vectors, retroviral vectors, lentiviral vectors, and the like.

[0286] The term “expression vector” refers to a vector comprising a recombinant polynucleotide comprising expression control sequences operatively linked to a nucleotide sequence to be expressed. An expression vector comprises sufficient cis-acting elements for expression; other elements for expression can be supplied by the host cell or in an in vitro expression system. Expression vectors include all those known in the art, including cosmids, plasmids (e.g., naked or contained in liposomes) and viruses (e.g., lentiviruses, retroviruses, adenoviruses, and adeno-associated viruses) that incorporate the recombinant polynucleotide.

[0287] The term “vector” as used herein refers to any vehicle that can be used to deliver and/or express a nucleic acid molecule. It can be a transfer vector or an expression vector as described herein.

[0288] The term “lentivirus” refers to a genus of the Retroviridae family. Lentiviruses are unique among the retroviruses in being able to infect non-dividing cells; they can deliver a significant amount of genetic information into the DNA of the host cell, so they are one of the most efficient methods of a gene delivery vector. HIV, SIV, and FIV are all examples of lentiviruses.

[0289] The term “lentiviral vector” refers to a vector derived from at least a portion of a lentivirus genome, including especially a self-inactivating lentiviral vector as provided in Milone et al., Mol. Ther. 17(8): 1453-1464 (2009). Other examples of lentivirus vectors that may be used in the clinic, include but are not limited to, e.g., the LENTIVECTOR® gene delivery technology from Oxford BioMedica, the LENTIMAX™ vector system from Lentigen and the like. Nonclinical types of lentiviral vectors are also available and would be known to one skilled in the art.

[0290] The term “homologous” or “identity” refers to the subunit sequence identity between two polymeric molecules, e.g., between two nucleic acid molecules, such as, two DNA molecules or two RNA molecules, or between two polypeptide molecules. When a subunit position in both of the two molecules is occupied by the same monomeric subunit; e.g., if a position in each of two DNA molecules is occupied by adenine, then they are homologous or identical at that position. The homology between two sequences is a direct function of the number of matching or homologous positions; e.g., if half (e.g., five positions in a polymer ten subunits in length) of the positions in two sequences are homologous, the two sequences are 50% homologous; if 90% of the positions (e.g., 9 of 10), are matched or homologous, the two sequences are 90% homologous.

[0291] “Humanized” forms of non-human (e.g., murine) antibodies are chimeric immunoglobulins, immunoglobulin chains or fragments thereof (such as Fv, Fab, Fab′, F(ab′)2 or other antigen-binding subsequences of antibodies) which contain minimal sequence derived from non-human immunoglobulin. For the most part, humanized antibodies and antibody fragments thereof are human immunoglobulins (recipient antibody or antibody fragment) in which residues from a complementary-determining region (CDR) of the recipient are replaced by residues from a CDR of a non-human species (donor antibody) such as mouse, rat or rabbit having the desired specificity, affinity, and capacity. In some instances, Fv framework region (FR) residues of the human immunoglobulin are replaced by corresponding non-human residues. Furthermore, a humanized antibody/antibody fragment can comprise residues which are found neither in the recipient antibody nor in the imported CDR or framework sequences. These modifications can further refine and optimize antibody or antibody fragment performance. In general, the humanized antibody or antibody fragment thereof will comprise substantially all of at least one, and typically two, variable domains, in which all or substantially all of the CDR regions correspond to those of a non-human immunoglobulin and all or a significant portion of the FR regions are those of a human immunoglobulin sequence. The humanized antibody or antibody fragment can also comprise at least a portion of an immunoglobulin constant region (Fc), typically that of a human immunoglobulin. For further details, see Jones et al., Nature, 321: 522-525, 1986; Reichmann et al., Nature, 332: 323-329, 1988; Presta, Curr. Op. Struct. Biol., 2: 593-596, 1992.

[0292] “Fully human” refers to an immunoglobulin, such as an antibody or antibody fragment, where the whole molecule is of human origin or consists of an amino acid sequence identical to a human form of the antibody or immunoglobulin.

[0293] The term “isolated” means altered or removed from the natural state. For example, a nucleic acid or a peptide naturally present in a living animal is not “isolated,” but the same nucleic acid or peptide partially or completely separated from the coexisting materials of its natural state is “isolated.” An isolated nucleic acid or protein can exist in substantially purified form, or can exist in a non-native environment such as, for example, a host cell.

[0294] In the context of the present invention, the following abbreviations for the commonly occurring nucleic acid bases are used. “A” refers to adenosine, “C” refers to cytosine, “G” refers to guanosine, “T” refers to thymidine, and “U” refers to uridine.

[0295] The term “operably linked” or “transcriptional control” refers to functional linkage between a regulatory sequence and a heterologous nucleic acid sequence resulting in expression of the latter. For example, a first nucleic acid sequence is operably linked with a second nucleic acid sequence when the first nucleic acid sequence is placed in a functional relationship with the second nucleic acid sequence. For instance, a promoter is operably linked to a coding sequence if the promoter affects the transcription or expression of the coding sequence. Operably linked DNA sequences can be contiguous with each other and, e.g., where necessary to join two protein coding regions, are in the same reading frame.

[0296] The term “parenteral” administration of an immunogenic composition includes, e.g., subcutaneous (s.c.), intravenous (i.v.), intramuscular (i.m.), or intrasternal injection, intratumoral, or infusion techniques.

[0297] The term “nucleic acid,” “polynucleotide,” or “nucleic acid molecule” refers to deoxyribonucleic acid (DNA) or ribonucleic acid (RNA), or a combination of a DNA or RNA thereof, and polymers thereof in either single- or double-stranded form. The term “nucleic acid” includes a gene, cDNA or an mRNA. In one embodiment, the nucleic acid molecule is synthetic (e.g., chemically synthesized) or recombinant. Unless specifically limited, the term encompasses nucleic acids containing analogues or derivatives of natural nucleotides that have similar binding properties as the reference nucleic acid and are metabolized in a manner similar to naturally occurring nucleotides. Unless otherwise indicated, a particular nucleic acid sequence also implicitly encompasses conservatively modified variants thereof (e.g., degenerate codon substitutions), alleles, orthologs, SNPs, and complementary sequences as well as the sequence explicitly indicated. Specifically, degenerate codon substitutions may be achieved by generating sequences in which the third position of one or more selected (or all) codons is substituted with mixed-base and/or deoxyinosine residues (Batzer et al., Nucleic Acid Res. 19:5081 (1991); Ohtsuka et al., J. Biol. Chem. 260:2605-2608 (1985); and Rossolini et al., Mol. Cell. Probes 8:91-98 (1994)).

[0298] The terms “peptide,” “polypeptide,” and “protein” are used interchangeably, and refer to a compound comprised of amino acid residues covalently linked by peptide bonds. A protein or peptide must contain at least two amino acids, and no limitation is placed on the maximum number of amino acids that can comprise a protein's or peptide's sequence. Polypeptides include any peptide or protein comprising two or more amino acids joined to each other by peptide bonds. As used herein, the term refers to both short chains, which also commonly are referred to in the art as peptides, oligopeptides and oligomers, for example, and to longer chains, which generally are referred to in the art as proteins, of which there are many types. “Polypeptides” include, for example, biologically active fragments, substantially homologous polypeptides, oligopeptides, homodimers, heterodimers, variants of polypeptides, modified polypeptides, derivatives, analogs, fusion proteins, among others. A polypeptide includes a natural peptide, a recombinant peptide, or a combination thereof.

[0299] The term “promoter” refers to a DNA sequence recognized by the synthetic machinery of the cell, or introduced synthetic machinery, required to initiate the specific transcription of a polynucleotide sequence.

[0300] The term “promoter/regulatory sequence” refers to a nucleic acid sequence which is required for expression of a gene product operably linked to the promoter/regulatory sequence. In some instances, this sequence may be the core promoter sequence and in other instances, this sequence may also include an enhancer sequence and other regulatory elements which are required for expression of the gene product. The promoter/regulatory sequence may, for example, be one which expresses the gene product in a tissue specific manner.

[0301] The term “constitutive” promoter refers to a nucleotide sequence which, when operably linked with a polynucleotide which encodes or specifies a gene product, causes the gene product to be produced in a cell under most or all physiological conditions of the cell.

[0302] The term “inducible” promoter refers to a nucleotide sequence which, when operably linked with a polynucleotide which encodes or specifies a gene product, causes the gene product to be produced in a cell substantially only when an inducer which corresponds to the promoter is present in the cell.

[0303] The term “tissue-specific” promoter refers to a nucleotide sequence which, when operably linked with a polynucleotide encodes or specified by a gene, causes the gene product to be produced in a cell substantially only if the cell is a cell of the tissue type corresponding to the promoter.

[0304] The term “cancer associated antigen” or “tumor antigen” interchangeably refers to a molecule (typically a protein, carbohydrate or lipid) that is expressed on the surface of a cancer cell, either entirely or as a fragment (e.g., MHC/peptide), and which is useful for the preferential targeting of a pharmacological agent to the cancer cell. In some embodiments, a tumor antigen is a marker expressed by both normal cells and cancer cells, e.g., a lineage marker, e.g., CD19 or CD123 on B cells. In some embodiments, a tumor antigen is a cell surface molecule that is overexpressed in a cancer cell in comparison to a normal cell, for instance, 1-fold over expression, 2-fold overexpression, 3-fold overexpression or more in comparison to a normal cell. In some enbodiments, a tumor antigen is a cell surface molecule that is inappropriately synthesized in the cancer cell, for instance, a molecule that contains deletions, additions or mutations in comparison to the molecule expressed on a normal cell. In some embodiments, a tumor antigen will be expressed exclusively on the cell surface of a cancer cell, entirely or as a fragment (e.g., MHC/peptide), and not synthesized or expressed on the surface of a normal cell. In some embodiments, the CARs of the present invention includes CARs comprising an antigen binding domain (e.g., antibody or antibody fragment) that binds to a MHC presented peptide. Normally, peptides derived from endogenous proteins fill the pockets of Major histocompatibility complex (MHC) class I molecules, and are recognized by T cell receptors (TCRs) on CD8+ T lymphocytes. The MHC class I complexes are constitutively expressed by all nucleated cells. In cancer, virus-specific and/or tumor-specific peptide/MHC complexes represent a unique class of cell surface targets for immunotherapy. TCR-like antibodies targeting peptides derived from viral or tumor antigens in the context of human leukocyte antigen (HLA)-A1 or HLA-A2 have been described (see, e.g., Sastry et al., J Virol. 2011 85(5):1935-1942; Sergeeva et al., Blood, 2011 117(16):4262-4272; Verma et al., J Immunol 2010 184(4):2156-2165; Willemsen et al., Gene Ther 2001 8(21):1601-1608; Dao et al., Sci Transl Med 2013 5(176):176ra33; Tassev et al., Cancer Gene Ther 2012 19(2):84-100). For example, TCR-like antibody can be identified from screening a library, such as a human scFv phage displayed library.

[0305] The term “flexible polypeptide linker” or “linker” as used in the context of a scFv refers to a peptide linker that consists of amino acids such as glycine and/or serine residues used alone or in combination, to link variable heavy and variable light chain regions together. In one embodiment, the flexible polypeptide linker is a Gly/Ser linker and comprises the amino acid sequence (Gly-Gly-Gly-Ser)n (SEQ ID NO: 38), where n is a positive integer equal to or greater than 1. For example, n=1, n=2, n=3. n=4, n=5 and n=6, n=7, n=8, n=9 and n=10 In one embodiment, the flexible polypeptide linkers include, but are not limited to, (Gly4 Ser)4 (SEQ ID NO:27) or (Gly4 Ser)3 (SEQ ID NO:28). In another embodiment, the linkers include multiple repeats of (Gly2Ser), (GlySer) or (Gly3Ser) (SEQ ID NO:29). Also included within the scope of the invention are linkers described in WO2012/138475, incorporated herein by reference).

[0306] As used herein, a 5′ cap (also termed an RNA cap, an RNA 7-methylguanosine cap or an RNA m⁷G cap) is a modified guanine nucleotide that has been added to the “front” or 5′ end of a eukaryotic messenger RNA shortly after the start of transcription. The 5′ cap consists of a terminal group which is linked to the first transcribed nucleotide. Its presence is critical for recognition by the ribosome and protection from RNases. Cap addition is coupled to transcription, and occurs co-transcriptionally, such that each influences the other. Shortly after the start of transcription, the 5′ end of the mRNA being synthesized is bound by a cap-synthesizing complex associated with RNA polymerase. This enzymatic complex catalyzes the chemical reactions that are required for mRNA capping. Synthesis proceeds as a multi-step biochemical reaction. The capping moiety can be modified to modulate functionality of mRNA such as its stability or efficiency of translation.

[0307] As used herein, “in vitro transcribed RNA” refers to RNA, preferably mRNA, that has been synthesized in vitro. Generally, the in vitro transcribed RNA is generated from an in vitro transcription vector. The in vitro transcription vector comprises a template that is used to generate the in vitro transcribed RNA.

[0308] As used herein, a “poly(A)” is a series of adenosines attached by polyadenylation to the mRNA. In the preferred embodiment of a construct for transient expression, the polyA is between 50 and 5000 (SEQ ID NO: 30), preferably greater than 64, more preferably greater than 100, most preferably greater than 300 or 400. poly(A) sequences can be modified chemically or enzymatically to modulate mRNA functionality such as localization, stability or efficiency of translation.

[0309] As used herein, “polyadenylation” refers to the covalent linkage of a polyadenylyl moiety, or its modified variant, to a messenger RNA molecule. In eukaryotic organisms, most messenger RNA (mRNA) molecules are polyadenylated at the 3′ end. The 3′ poly(A) tail is a long sequence of adenine nucleotides (often several hundred) added to the pre-mRNA through the action of an enzyme, polyadenylate polymerase. In higher eukaryotes, the poly(A) tail is added onto transcripts that contain a specific sequence, the polyadenylation signal. The poly(A) tail and the protein bound to it aid in protecting mRNA from degradation by exonucleases. Polyadenylation is also important for transcription termination, export of the mRNA from the nucleus, and translation. Polyadenylation occurs in the nucleus immediately after transcription of DNA into RNA, but additionally can also occur later in the cytoplasm. After transcription has been terminated, the mRNA chain is cleaved through the action of an endonuclease complex associated with RNA polymerase. The cleavage site is usually characterized by the presence of the base sequence AAUAAA near the cleavage site. After the mRNA has been cleaved, adenosine residues are added to the free 3′ end at the cleavage site.

[0310] As used herein, “transient” refers to expression of a non-integrated transgene for a period of hours, days or weeks, wherein the period of time of expression is less than the period of time for expression of the gene if integrated into the genome or contained within a stable plasmid replicon in the host cell.

[0311] As used herein, the terms “treat”, “treatment” and “treating” refer to the reduction or amelioration of the progression, severity and/or duration of a proliferative disorder, or the amelioration of one or more symptoms (preferably, one or more discernible symptoms) of a proliferative disorder resulting from the administration of one or more therapies (e.g., one or more therapeutic agents such as a CAR of the invention). In specific embodiments, the terms “treat”, “treatment” and “treating” refer to the amelioration of at least one measurable physical parameter of a proliferative disorder, such as growth of a tumor, not necessarily discernible by the patient. In other embodiments the terms “treat”, “treatment” and “treating”-refer to the inhibition of the progression of a proliferative disorder, either physically by, e.g., stabilization of a discernible symptom, physiologically by, e.g., stabilization of a physical parameter, or both. In other embodiments the terms “treat”, “treatment” and “treating” refer to the reduction or stabilization of tumor size or cancerous cell count.

[0312] A dosage regimen, e.g., a therapeutic dosage regimen, can include one or more treatment intervals. The dosage regimen can result in at least one beneficial or desired clinical result including, but are not limited to, alleviation of a symptom, diminishment of extent of disease, stabilized (i.e., not worsening) state of disease, delay or slowing of disease progression, amelioration or palliation of the disease state, whether detectable or undetectable.

[0313] As used herein, a “treatment interval” refers to a treatment cycle, for example, a course of administration of a therapeutic agent that can be repeated, e.g., on a regular schedule. In embodiments, a dosage regimen can have one or more periods of no administration of the therapeutic agent in between treatment intervals. For example, a treatment interval can include one dose of a CAR molecule administered in combination with (prior, concurrently or after) administration of a second therapeutic agent, e.g., an inhibitor (e.g., a kinase inhibitor as described herein).

[0314] The term “signal transduction pathway” refers to the biochemical relationship between a variety of signal transduction molecules that play a role in the transmission of a signal from one portion of a cell to another portion of a cell. The phrase “cell surface receptor” includes molecules and complexes of molecules capable of receiving a signal and transmitting signal across the membrane of a cell.

[0315] The term “subject” is intended to include living organisms in which an immune response can be elicited (e.g., mammals, human).

[0316] The term, a “substantially purified” cell refers to a cell that is essentially free of other cell types. A substantially purified cell also refers to a cell which has been separated from other cell types with which it is normally associated in its naturally occurring state. In some instances, a population of substantially purified cells refers to a homogenous population of cells. In other instances, this term refers simply to cell that have been separated from the cells with which they are naturally associated in their natural state. In some aspects, the cells are cultured in vitro. In other aspects, the cells are not cultured in vitro.

[0317] The term “therapeutic” as used herein means a treatment. A therapeutic effect is obtained by reduction, suppression, remission, or eradication of a disease state.

[0318] In embodiments, a disease state treated includes CRS. In some embodiments, treatment of CRS includes administration of a composition or combination described herein after the onset, e.g., after detection of, one or more CRS symptoms. In some embodiments, treatment of CRS results in a reduction in the severity of CRS, e.g., relative to a subject not administered the composition or combination described herein. For example, the subject may reduce CRS to an undetectable level. In other embodiments, the treatment results in a less severe form of CRS, e.g., grade 1, 2, or 3 CRS.

[0319] The term “prophylaxis” as used herein means the prevention of or protective treatment for a disease or disease state. Prevention of a disease or disease state can include reduction (e.g., mitigation) of one or more symptoms of the disease or disease state, e.g., relative to a reference level (e.g., the symptom(s) in a similar subject not administered the treatment). Prevention can also include delaying onset of one or more symptoms of the disease or disease state, e.g., relative to a reference level (e.g., the onset of the symptom(s) in a similar subject not administered the treatment). In embodiments, a disease is a disease described herein.

[0320] In embodiments, a disease state prevented includes CRS. In some embodiments, prevention of CRS includes administration of a composition or combination described herein prior to, e.g., prior to detection or onset of, one or more CRS symptoms. In some embodiments, administration of the JAK-STAT inhibitor or the BTK inhibitor occurs prior to the CAR therapy. In some embodiments, prevention of CRS results in a reduction in the likelihood or severity of CRS, e.g., relative to a subject not administered the composition or combination described herein. For example, the subject may not develop CRS. In other embodiments, the subject develops a less severe form of CRS, e.g., grade 1, 2, or 3 CRS, e.g., relative to a subject not administered the composition or combination described herein.

[0321] In the context of the present invention, “tumor antigen” or “hyperproliferative disorder antigen” or “antigen associated with a hyperproliferative disorder” refers to antigens that are common to specific hyperproliferative disorders. In certain aspects, the hyperproliferative disorder antigens of the present invention are derived from, cancers including but not limited to primary or metastatic melanoma, thymoma, lymphoma, sarcoma, lung cancer, liver cancer, non-Hodgkin lymphoma, non-Hodgkin lymphoma, leukemias, uterine cancer, cervical cancer, bladder cancer, kidney cancer and adenocarcinomas such as breast cancer, prostate cancer, ovarian cancer, pancreatic cancer, and the like.

[0322] The term “transfected” or “transformed” or “transduced” refers to a process by which exogenous nucleic acid is transferred or introduced into the host cell. A “transfected” or “transformed” or “transduced” cell is one which has been transfected, transformed or transduced with exogenous nucleic acid. The cell includes the primary subject cell and its progeny.

[0323] The term “specifically binds,” refers to an antibody, or a ligand, which recognizes and binds with a cognate binding partner (e.g., a stimulatory and/or costimulatory molecule present on a T cell) protein present in a sample, but which antibody or ligand does not substantially recognize or bind other molecules in the sample.

[0324] “Regulatable chimeric antigen receptor (RCAR),” as used herein, refers to a set of polypeptides, typically two in the simplest embodiments, which when in an immune effector cell, provides the cell with specificity for a target cell, typically a cancer cell, and with regulatable intracellular signal generation. In some embodiments, an RCAR comprises at least an extracellular antigen binding domain, a transmembrane and a cytoplasmic signaling domain (also referred to herein as “an intracellular signaling domain”) comprising a functional signaling domain derived from a stimulatory molecule and/or costimulatory molecule as defined herein in the context of a CAR molecule. In some embodiments, the set of polypeptides in the RCAR are not contiguous with each other, e.g., are in different polypeptide chains. In some embodiments, the RCAR includes a dimerization switch that, upon the presence of a dimerization molecule, can couple the polypeptides to one another, e.g., can couple an antigen binding domain to an intracellular signaling domain. In some embodiments, the RCAR is expressed in a cell (e.g., an immune effector cell) as described herein, e.g., an RCAR-expressing cell (also referred to herein as “RCARX cell”). In an embodiment the RCARX cell is a T cell, and is referred to as a RCART cell. In an embodiment the RCARX cell is an NK cell, and is referred to as a RCARN cell. The RCAR can provide the RCAR-expressing cell with specificity for a target cell, typically a cancer cell, and with regulatable intracellular signal generation or proliferation, which can optimize an immune effector property of the RCAR-expressing cell. In embodiments, an RCAR cell relies at least in part, on an antigen binding domain to provide specificity to a target cell that comprises the antigen bound by the antigen binding domain.

[0325] “Membrane anchor” or “membrane tethering domain”, as that term is used herein, refers to a polypeptide or moiety, e.g., a myristoyl group, sufficient to anchor an extracellular or intracellular domain to the plasma membrane.

[0326] “Switch domain,” as that term is used herein, e.g., when referring to an RCAR, refers to an entity, typically a polypeptide-based entity, that, in the presence of a dimerization molecule, associates with another switch domain. The association results in a functional coupling of a first entity linked to, e.g., fused to, a first switch domain, and a second entity linked to, e.g., fused to, a second switch domain. A first and second switch domain are collectively referred to as a dimerization switch. In embodiments, the first and second switch domains are the same as one another, e.g., they are polypeptides having the same primary amino acid sequence, and are referred to collectively as a homodimerization switch. In embodiments, the first and second switch domains are different from one another, e.g., they are polypeptides having different primary amino acid sequences, and are referred to collectively as a heterodimerization switch. In embodiments, the switch is intracellular. In embodiments, the switch is extracellular. In embodiments, the switch domain is a polypeptide-based entity, e.g., FKBP or FRB-based, and the dimerization molecule is small molecule, e.g., a rapalogue. In embodiments, the switch domain is a polypeptide-based entity, e.g., an scFv that binds a myc peptide, and the dimerization molecule is a polypeptide, a fragment thereof, or a multimer of a polypeptide, e.g., a myc ligand or multimers of a myc ligand that bind to one or more myc scFvs. In embodiments, the switch domain is a polypeptide-based entity, e.g., myc receptor, and the dimerization molecule is an antibody or fragments thereof, e.g., myc antibody.

[0327] “Dimerization molecule,” as that term is used herein, e.g., when referring to an RCAR, refers to a molecule that promotes the association of a first switch domain with a second switch domain. In embodiments, the dimerization molecule does not naturally occur in the subject, or does not occur in concentrations that would result in significant dimerization. In embodiments, the dimerization molecule is a small molecule, e.g., rapamycin or a rapalogue, e.g, RAD001.

[0328] The term “bioequivalent” refers to an amount of an agent other than the reference compound (e.g., RAD001), required to produce an effect equivalent to the effect produced by the reference dose or reference amount of the reference compound (e.g., RAD001). In an embodiment the effect is the level of mTOR inhibition, e.g., as measured by P70 S6 kinase inhibition, e.g., as evaluated in an in vivo or in vitro assay, e.g., as measured by an assay described herein, e.g., the Boulay assay, or measurement of phosphorylated S6 levels by western blot. In an embodiment, the effect is alteration of the ratio of PD-1 positive/PD-1 negative immune effector cells, e.g., T cells or NK cells, as measured by cell sorting. In an embodiment a bioequivalent amount or dose of an mTOR inhibitor is the amount or dose that achieves the same level of P70 S6 kinase inhibition as does the reference dose or reference amount of a reference compound. In an embodiment, a bioequivalent amount or dose of an mTOR inhibitor is the amount or dose that achieves the same level of alteration in the ratio of PD-1 positive/PD-1 negative immune effector cells, e.g., T cells or NK cells as does the reference dose or reference amount of a reference compound.

[0329] The term “low, immune enhancing, dose” when used in conjuction with an mTOR inhibitor, e.g., an allosteric mTOR inhibitor, e.g., RAD001 or rapamycin, or a catalytic mTOR inhibitor, refers to a dose of mTOR inhibitor that partially, but not fully, inhibits mTOR activity, e.g., as measured by the inhibition of P70 S6 kinase activity. Methods for evaluating mTOR activity, e.g., by inhibition of P70 S6 kinase, are discussed herein. The dose is insufficient to result in complete immune suppression but is sufficient to enhance the immune response. In an embodiment, the low, immune enhancing, dose of mTOR inhibitor results in a decrease in the number of PD-1 positive immune effector cells, e.g., T cells or NK cells, and/or an increase in the number of PD-1 negative immune effector cells, e.g., T cells or NK cells, or an increase in the ratio of PD-1 negative T cells/PD-1 positive immune effector cells, e.g., T cells or NK cells.

[0330] In an embodiment, the low, immune enhancing, dose of mTOR inhibitor results in an increase in the number of naive immune effector cells, e.g., T cells or NK cells. In an embodiment, the low, immune enhancing, dose of mTOR inhibitor results in one or more of the following:
[0331] an increase in the expression of one or more of the following markers: CD62L^{high}, CD127^{high}, CD27⁺, and BCL2, e.g., on memory T cells, e.g., memory T cell precursors;
[0332] a decrease in the expression of KLRG1, e.g., on memory T cells, e.g., memory T cell precursors; and
[0333] an increase in the number of memory T cell precursors, e.g., cells with any one or combination of the following characteristics: increased CD62L^{high}, increased CD127^{high}, increased CD27⁺, decreased KLRG1, and increased BCL2;

[0334] wherein any of the changes described above occurs, e.g., at least transiently, e.g., as compared to a non-treated subject.

[0335] “Refractory” as used herein refers to a disease, e.g., cancer, that does not respond to a treatment. In embodiments, a refractory cancer can be resistant to a treatment before or at the beginning of the treatment. In other embodiments, the refractory cancer can become resistant during a treatment. A refractory cancer is also called a resistant cancer.

[0336] “Relapsed” or “relapse” as used herein refers to the return or reappearance of a disease (e.g., cancer) or the signs and symptoms of a disease such as cancer after a period of improvement or responsiveness, e.g., after prior treatment of a therapy, e.g., cancer therapy. The initial period of responsiveness may involve the level of cancer cells falling below a certain threshold, e.g., below 20%, 1%, 10%, 5%, 4%, 3%, 2%, or 1%. The reappearance may involve the level of cancer cells rising above a certain threshold, e.g., above 20%, 1%, 10%, 5%, 4%, 3%, 2%, or 1%. For example, e.g., in the context of B-ALL, the reappearance may involve, e.g., a reappearance of blasts in the blood, bone marrow (>5%), or any extramedullary site, after a complete response. A complete response, in this context, may involve <5% BM blast. More generally, in an embodiment, a response (e.g., complete response or partial response) can involve the absence of detectable MRD (minimal residual disease). In an embodiment, the initial period of responsiveness lasts at least 1, 2, 3, 4, 5, or 6 days; at least 1, 2, 3, or 4 weeks; at least 1, 2, 3, 4, 6, 8, 10, or 12 months; or at least 1, 2, 3, 4, or 5 years.

[0337] In some embodiments, a therapy that includes a CD19 inhibitor, e.g., a CD19 CAR therapy, may relapse or be refractory to treatment. The relapse or resistance can be caused by CD19 loss (e.g., an antigen loss mutation) or other CD19 alteration that reduces the level of CD19 (e.g., caused by clonal selection of CD19-negative clones). A cancer that harbors such CD19 loss or alteration is referred to herein as a “CD19-negative cancer” or a “CD19-negative relapsed cancer”). It shall be understood that a CD19-negative cancer need not have 100% loss of CD19, but a sufficient reduction to reduce the effectiveness of a CD19 therapy such that the cancer relapses or becomes refractory. In some embodiments, a CD19-negative cancer results from a CD19 CAR therapy.

[0338] As used herein, “JAK-STAT” refers to the JAK-STAT signaling pathway and/or one or more kinase in the JAK-STAT pathway. The JAK-STAT signaling pathway and its components are described in greater detail herein.

[0339] Ranges: throughout this disclosure, various aspects of the invention can be presented in a range format. It should be understood that the description in range format is merely for convenience and brevity and should not be construed as an inflexible limitation on the scope of the invention. Accordingly, the description of a range should be considered to have specifically disclosed all the possible subranges as well as individual numerical values within that range. For example, description of a range such as from 1 to 6 should be considered to have specifically disclosed subranges such as from 1 to 3, from 1 to 4, from 1 to 5, from 2 to 4, from 2 to 6, from 3 to 6 etc., as well as individual numbers within that range, for example, 1, 2, 2.7, 3, 4, 5, 5.3, and 6. As another example, a range such as 95-99% identity, includes something with 95%, 96%, 97%, 98% or 99% identity, and includes subranges such as 96-99%, 96-98%, 96-97%, 97-99%, 97-98% and 98-99% identity. This applies regardless of the breadth of the range.

### Description

[0340] Provided herein are methods for preventing CRS in a subject. The method can include administration of a CAR described herein in combination with a kinase inhibitor, e.g., inhibitor of JAK-STAT or BTK.

[0341] Also provided herein are compositions of matter and methods of use for the treatment or prevention of a disease such as cancer using a chimeric antigen receptor (CAR) in combination with a kinase inhibitor, e.g., inhibitor of JAK-STAT or BTK.

[0342] Example 3 herein describes that in CAR T cell-associated CRS, IL-6 is produced by antigen presenting cells (myeloid cells) and that IL-6 presence or absence (e.g., as measured by degranulation in the presence or absence of APCs) did not affect CART function. Accordingly, in some embodiments, a CAR described herein is administered in combination with an IL-6 inhibitor, e.g., tocilizumab. In embodiments, methods described herein provide for early administration of an IL-6 inhibitor, e.g., tocilizumab, to prevent CRS associated with CAR therapy. In embodiments, early administration include administration prior to a CAR therapy, at the same time as a CAR therapy dose, or up until a first sign of a fever (e.g., after a CAR therapy dose). In some embodiments, the combination of CAR and IL-6 inhibitor described herein can further comprise a kinase inhibitor, e.g., a kinase inhibitor as described herein.

[0343] A chimeric antigen receptor (CAR) comprising an antibody or antibody fragment engineered for specific binding to an antigen (e.g., CD123 protein or CD19 protein or fragments thereof) can be used in accordance with any method or composition described herein. In one aspect, the invention provides a cell (e.g., an immune effector cell, e.g., a T cell or a NK cell) engineered to express a CAR, wherein the CAR-expressing cell (e.g., “CART” or CAR-expressing NK cell) exhibits an antitumor property. In one aspect a cell is transformed with the CAR and the at least part of the CAR is expressed on the cell surface. In some embodiments, the cell (e.g., immune effector cell, e.g., T cell or NK cell) is transduced with a viral vector encoding a CAR. In some embodiments, the viral vector is a retroviral vector. In some embodiments, the viral vector is a lentiviral vector. In some such embodiments, the cell may stably express the CAR. In another embodiment, the cell (e.g., immune effector cell, e.g., T cell or NK cell) is transfected with a nucleic acid, e.g., mRNA, cDNA, DNA, encoding a CAR. In some such embodiments, the cell may transiently express the CAR.

[0344] In one aspect, the antigen binding domain (e.g., CD123 binding domain or CD19 binding domain), e.g., the human or humanized CD123 binding domain or CD19 binding domain, of the CAR is a scFv antibody fragment. In one aspect, such antibody fragments are functional in that they retain the equivalent binding affinity, e.g., they bind the same antigen with comparable efficacy, as the IgG antibody having the same heavy and light chain variable regions. In one aspect such antibody fragments are functional in that they provide a biological response that can include, but is not limited to, activation of an immune response, inhibition of signal-transduction origination from its target antigen, inhibition of kinase activity, and the like, as will be understood by a skilled artisan.

[0345] In some aspects, the antibodies of the invention are incorporated into a chimeric antigen receptor (CAR). In one aspect, the CAR is a CD123 CAR and comprises the polypeptide sequence provided herein as SEQ ID NOS: 98-101, and 125-156.

[0346] In one aspect, the antigen binding domain (CD123 or CD19 binding domain, e.g., humanized or human CD123 or CD19 binding domain) portion of a CAR of the invention is encoded by a transgene whose sequence has been codon optimized for expression in a mammalian cell. In one aspect, entire CAR construct of the invention is encoded by a transgene whose entire sequence has been codon optimized for expression in a mammalian cell. Codon optimization refers to the discovery that the frequency of occurrence of synonymous codons (i.e., codons that code for the same amino acid) in coding DNA is biased in different species. Such codon degeneracy allows an identical polypeptide to be encoded by a variety of nucleotide sequences. A variety of codon optimization methods is known in the art, and include, e.g., methods disclosed in at least U.S. Pat. Nos. 5,786,464 and 6,114,148.

[0347] In one aspect, the antigen binding domain of the CAR comprises a human CD123 antibody or antibody fragment or a human CD19 antibody or antibody fragment. In one aspect, the antigen binding domain of the CAR comprises a humanized CD123 or CD19 antibody or antibody fragment. In one aspect, the antigen binding domain of the CAR comprises human CD123 or CD19 antibody fragment comprising an scFv. In one aspect, the antigen binding domain of the CAR is a human CD123 scFv or a human CD19 scFv. In one aspect, the antigen binding domain of the CAR comprises a humanized CD123 or CD19 antibody fragment comprising an scFv. In one aspect, the antigen binding domain of the CAR is a humanized CD123 scFv or CD19 scFv.

[0348] In one aspect, the CAR123 binding domain comprises the scFv portion provided in SEQ ID NO:157-160 and 184-215. In one aspect the scFv portion is human. In one aspect, the human CAR123 binding domain comprises the scFv portion provided in SEQ ID NO:157-160. In one aspect, the human CD123 binding domain comprises the scFv portion provided in SEQ ID NO: 478, 480, 483, or 485.

[0349] In one aspect the scFv portion is humanized. In one aspect, the humanized CAR123 binding domain comprises the scFv portion provided in SEQ ID NO:184-215. In one aspect, the humanized CD123 binding domain comprises the scFv portion provided in SEQ ID NOs: 556-587.

[0350] Furthermore, the present invention provides CD123 CAR compositions and their use in medicaments or methods for treating, among other diseases, cancer or any malignancy or autoimmune diseases involving cells or tissues which express CD123.

[0351] In one aspect, the CAR of the invention can be used to eradicate CD123-expressing normal cells, thereby applicable for use as a cellular conditioning therapy prior to cell transplantation. In one aspect, the CD123-expressing normal cell is a CD123-expressing expressing myeloid progenitor cell and the cell transplantation is a stem cell transplantation.

[0352] In one aspect, the invention provides a cell (e.g., an immune effector cell, e.g., a T cell or NK cell) engineered to express a chimeric antigen receptor (e.g., CAR-expressing immune effector cell, e.g., CART or CAR-expressing NK cell) of the present invention, wherein the cell (e.g., “CART”) exhibits an antitumor property. Accordingly, the invention provides a CD123-CAR that comprises a CD123 binding domain and is engineered into an immune effector cell, e.g., a T cell or a NK cell, and methods of their use for adoptive therapy.

[0353] In one aspect, the CD123-CAR comprises at least one intracellular domain, e.g., described herein, e.g., selected from the group of a CD137 (4-1BB) signaling domain, a CD28 signaling domain, a CD3zeta signal domain, and any combination thereof. In one aspect, the CD123-CAR comprises at least one intracellular signaling domain is from one or more co-stimulatory molecule(s) other than a CD137 (4-1BB) or CD28.

### Chimeric Antigen Receptor (CAR)

[0354] In accordance with any method or composition described herein, in embodiments, a CAR molecule comprises a CD123 CAR described herein, e.g., a CD123 CAR described in US2014/0322212A1 or US2016/0068601A1, both incorporated herein by reference. In embodiments, the CD123 CAR comprises an amino acid, or has a nucleotide sequence shown in US2014/0322212A1 or US2016/0068601A1, both incorporated herein by reference. In other embodiments, a CAR molecule comprises a CD19 CAR molecule described herein, e.g., a CD19 CAR molecule described in US-2015-0283178-A1, e.g., CTL019. In embodiments, the CD19 CAR comprises an amino acid, or has a nucleotide sequence shown in US-2015-0283178-A1, incorporated herein by reference. In one embodiment, CAR molecule comprises a BCMA CAR molecule described herein, e.g., a BCMA CAR described in US-2016-0046724-A1. In embodiments, the BCMA CAR comprises an amino acid, or has a nucleotide sequence shown in US-2016-0046724-A1, incorporated herein by reference. In an embodiment, the CAR molecule comprises a CLL1 CAR described herein, e.g., a CLL1 CAR described in US2016/0051651A1, incorporated herein by reference. In embodiments, the CLL1 CAR comprises an amino acid, or has a nucleotide sequence shown in US2016/0051651A1, incorporated herein by reference. In an embodiment, the CAR molecule comprises a CD33 CAR described herein, e.ga CD33 CAR described in US2016/0096892A1, incorporated herein by reference. In embodiments, the CD33 CAR comprises an amino acid, or has a nucleotide sequence shown in US2016/0096892A1, incorporated herein by reference. In an embodiment, the CAR molecule comprises an EGFRvIII CAR molecule described herein, e.g., an EGFRvIII CAR described US2014/0322275A1, incorporated herein by reference. In embodiments, the EGFRvIII CAR comprises an amino acid, or has a nucleotide sequence shown in US2014/0322275A1, incorporated herein by reference. In an embodiment, the CAR molecule comprises a mesothelin CAR described herein, e.g., a mesothelin CAR described in WO 2015/090230, incorporated herein by reference. In embodiments, the mesothelin CAR comprises an amino acid, or has a nucleotide sequence shown in WO 2015/090230, incorporated herein by reference.

### CAR123

[0355] The present invention encompasses a recombinant DNA construct comprising sequences encoding a CAR, wherein the CAR comprises an antigen binding domain (e.g., antibody, antibody fragment) that binds specifically to CD123 or a fragment thereof, e.g., human CD123, wherein the sequence of the CD123 binding domain (e.g., antibody or antibody fragment) is, e.g., contiguous with and in the same reading frame as a nucleic acid sequence encoding an intracellular signaling domain. The intracellular signaling domain can comprise a costimulatory signaling domain and/or a primary signaling domain, e.g., a zeta chain. The costimulatory signaling domain refers to a portion of the CAR comprising at least a portion of the intracellular domain of a costimulatory molecule.

[0356] In specific aspects, a CAR construct of the invention comprises a scFv domain selected from the group consisting of SEQ ID NOS:157-160, 184-215, 478, 480, 483, 485, and 556-587 wherein the scFv may be preceded by an optional leader sequence such as provided in SEQ ID NO: 1, and followed by an optional hinge sequence such as provided in SEQ ID NO:2 or SEQ ID NO:3 or SEQ ID NO:4 or SEQ ID NO:5, a transmembrane region such as provided in SEQ ID NO:6, an intracellular signalling domain that includes SEQ ID NO:7 or SEQ ID NO:8 and a CD3 zeta sequence that includes SEQ ID NO:9 or SEQ ID NO:10, e.g., wherein the domains are contiguous with and in the same reading frame to form a single fusion protein. In some embodiments, the scFv domain is a human scFv domain selected from the group consisting of SEQ ID NOS: 157-160, 478, 480, 483, and 485. In some embodiments, the scFv domain is a humanized scFv domain selected from the group consisting of SEQ ID NOS: 184-215 and 556-587. Also included in the invention is a nucleotide sequence that encodes the polypeptide of each of the scFv fragments selected from the group consisting of SEQ ID NO: 157-160, 184-215, 478, 480, 483, 485, and 556-587. Also included in the invention is a nucleotide sequence that encodes the polypeptide of each of the scFv fragments selected from the group consisting of SEQ ID NO: 157-160, 184-215, 478, 480, 483, 485, and 556-587, and each of the domains of SEQ ID NOS: 1, 2, and 6-9, plus the encoded CD123 CAR of the invention.

[0357] In one aspect an exemplary CD123CAR constructs comprise an optional leader sequence, an extracellular antigen binding domain, a hinge, a transmembrane domain, and an intracellular stimulatory domain. In one aspect an exemplary CD123CAR construct comprises an optional leader sequence, an extracellular antigen binding domain, a hinge, a transmembrane domain, an intracellular costimulatory domain and an intracellular stimulatory domain.

[0358] In some embodiments, full-length CD123 CAR sequences are also provided herein as SEQ ID NOS: 98-101 and 125-156, as shown in Table 11A or 12A.

[0359] An exemplary leader sequence is provided as SEQ ID NO: 1. An exemplary hinge/spacer sequence is provided as SEQ ID NO:2 or SEQ ID NO:3 or SEQ ID NO:4 or SEQ ID NO:5. An exemplary transmembrane domain sequence is provided as SEQ ID NO:6. An exemplary sequence of the intracellular signaling domain of the 4-1BB protein is provided as SEQ ID NO: 7. An exemplary sequence of the intracellular signaling domain of CD27 is provided as SEQ ID NO:8. An exemplary CD3zeta domain sequence is provided as SEQ ID NO: 9 or SEQ ID NO:10. An exemplary sequence of the intracellular signaling domain of CD28 is provided as SEQ ID NO:43. An exemplary sequence of the intracellular signaling domain of ICOS is provided as SEQ ID NO:45.

[0360] In one aspect, the present invention encompasses a recombinant nucleic acid construct comprising a nucleic acid molecule encoding a CAR, wherein the nucleic acid molecule comprises the nucleic acid sequence encoding a CD123 binding domain, e.g., described herein, e.g., that is contiguous with and in the same reading frame as a nucleic acid sequence encoding an intracellular signaling domain. In one aspect, a CD123 binding domain is selected from one or more of SEQ ID NOS: 157-160, 184-215, 478, 480, 483, 485, and 556-587. In some embodiments, the CD123 binding domain is a human CD123 binding domain selected from the group consisting of SEQ ID NOS: 157-160, 478, 480, 483, and 485. In some embodiments, the CD123 binding domain is a humanized CD123 binding domain selected from the group consisting of SEQ ID NOS: 184-215 and 556-587.

[0361] In one aspect, the present invention encompasses a recombinant nucleic acid construct comprising a nucleic acid molecule encoding a CAR, wherein the nucleic acid molecule comprises a nucleic acid sequence encoding a CD123 binding domain, e.g., wherein the sequence is contiguous with and in the same reading frame as the nucleic acid sequence encoding an intracellular signaling domain. An exemplary intracellular signaling domain that can be used in the CAR includes, but is not limited to, one or more intracellular signaling domains of, e.g., CD3-zeta, CD28, 4-1BB, ICOS, and the like. In some instances, the CAR can comprise any combination of CD3-zeta, CD28, 4-1BB, ICOS, and the like.

[0362] In one aspect, the nucleic acid sequence of a CAR construct of the invention is selected from one or more of SEQ ID NOS:39-42 and 66-97. The nucleic acid sequences coding for the desired molecules can be obtained using recombinant methods known in the art, such as, for example by screening libraries from cells expressing the gene, by deriving the gene from a vector known to include the same, or by isolating directly from cells and tissues containing the same, using standard techniques. Alternatively, the nucleic acid of interest can be produced synthetically, rather than cloned.

### CAR19 (or CD19 CAR)

[0363] The present disclosure encompasses immune effector cells (e.g., T cells or NK cells) comprising a CAR molecule that targets, e.g., specifically binds, to CD19 (CD19 CAR). In one embodiment, the immune effector cells are engineered to express the CD19 CAR. In one embodiment, the immune effector cells comprise a recombinant nucleic acid construct comprising nucleic acid sequences encoding the CD19 CAR.

[0364] In embodiments, the CD19 CAR comprises an antigen binding domain that specifically binds to CD19, e.g., CD19 binding domain, a transmembrane domain, and an intracellular signaling domain. In one embodiment, the sequence of the antigen binding domain is contiguous with and in the same reading frame as a nucleic acid sequence encoding an intracellular signaling domain. The intracellular signaling domain can comprise a costimulatory signaling domain and/or a primary signaling domain, e.g., a zeta chain. The costimulatory signaling domain refers to a portion of the CAR comprising at least a portion of the intracellular domain of a costimulatory molecule.

[0365] In one aspect, exemplary CAR constructs comprise an optional leader sequence (e.g., a leader sequence described herein), an extracellular antigen binding domain (e.g., an antigen binding domain described herein), a hinge (e.g., a hinge region described herein), a transmembrane domain (e.g., a transmembrane domain described herein), and an intracellular stimulatory domain (e.g., an intracellular stimulatory domain described herein). In one aspect, an exemplary CAR construct comprises an optional leader sequence (e.g., a leader sequence described herein), an extracellular antigen binding domain (e.g., an antigen binding domain described herein), a hinge (e.g., a hinge region described herein), a transmembrane domain (e.g., a transmembrane domain described herein), an intracellular costimulatory signaling domain (e.g., a costimulatory signaling domain described herein) and/or an intracellular primary signaling domain (e.g., a primary signaling domain described herein).

[0366] In one aspect, the CD19 CARs of the invention comprise at least one intracellular signaling domain selected from the group of a CD137 (4-1BB) signaling domain, a CD28 signaling domain, a CD27 signaling domain, an ICOS signaling domain, a CD3zeta signal domain, and any combination thereof. In one aspect, the CARs of the invention comprise at least one intracellular signaling domain is from one or more costimulatory molecule(s) selected from CD137 (4-1BB), CD28, CD27, or ICOS.

### Vectors and RNA Constructs

[0367] The present invention includes retroviral and lentiviral vector constructs expressing a CAR that can be directly transduced into a cell.

[0368] The present invention also includes an RNA construct that can be directly transfected into a cell. A method for generating mRNA for use in transfection involves in vitro transcription (IVT) of a template with specially designed primers, followed by polyA addition, to produce a construct containing 3′ and 5′ untranslated sequence (“UTR”), a 5′ cap and/or Internal Ribosome Entry Site (IRES), the nucleic acid to be expressed, and a polyA tail, typically 50-2000 bases in length (SEQ ID NO:35). RNA so produced can efficiently transfect different kinds of cells. In one embodiment, the template includes sequences for the CAR. In an embodiment, an RNA CAR vector is transduced into a T cell by electroporation.

### Antigen Binding Domain

[0369] In one aspect, the CAR of the invention comprises a target-specific binding element otherwise referred to as an antigen binding domain. The choice of moiety depends upon the type and number of ligands that define the surface of a target cell. For example, the antigen binding domain may be chosen to recognize a ligand that acts as a cell surface marker on target cells associated with a particular disease state. Thus, examples of cell surface markers that may act as ligands for the antigen binding domain in a CAR of the invention include those associated with viral, bacterial and parasitic infections, autoimmune disease and cancer cells.

[0370] In one aspect, the CAR-mediated T-cell response can be directed to an antigen of interest by way of engineering an antigen binding domain that specifically binds a desired antigen into the CAR.

[0371] In one aspect, the portion of the CAR comprising the antigen binding domain comprises an antigen binding domain that targets a tumor antigen, e.g., a tumor antigen described herein.

[0372] In one aspect, the portion of the CAR comprising the antigen binding domain comprises an antigen binding domain that targets CD123 or a fragment thereof. In embodiments, the antigen binding domain targets human CD123 or a fragment thereof. In other embodiments, the antigen binding domain targets a B cell antigen (e.g., B cell surface antigen), e.g., CD10, CD19, CD20, CD22, CD34, CD123, FLT-3, ROR1, CD79b, CD179b, or CD79a.

[0373] The antigen binding domain can be any domain that binds to the antigen including but not limited to a monoclonal antibody, a polyclonal antibody, a recombinant antibody, a human antibody, a humanized antibody, and a functional fragment thereof, including but not limited to a single-domain antibody such as a heavy chain variable domain (VH), a light chain variable domain (VL) and a variable domain (VHH) of camelid derived nanobody, and to an alternative scaffold known in the art to function as antigen binding domain, such as a recombinant fibronectin domain, and the like. In some instances, it is beneficial for the antigen binding domain to be derived from the same species in which the CAR will ultimately be used in. For example, for use in humans, it may be beneficial for the antigen binding domain of the CAR to comprise human or humanized residues for the antigen binding domain of an antibody or antibody fragment.

[0374] In one embodiment, the antigen binding domain comprises one, two three (e.g., all three) heavy chain CDRs, HC CDR1, HC CDR2 and HC CDR3, from an antibody described herein (e.g., an antibody described in WO2015/142675, US-2015-0283178-A1, US-2016-0046724-A1, US2014/0322212A1, US2016/0068601A1, US2016/0051651A1, US2016/0096892A1, US2014/0322275A1, or WO2015/090230, incorporated herein by reference), and/or one, two, three (e.g., all three) light chain CDRs, LC CDR1, LC CDR2 and LC CDR3, from an antibody described herein (e.g., an antibody described in WO2015/142675, US-2015-0283178-A1, US-2016-0046724-A1, US2014/0322212A1, US2016/0068601A1, US2016/0051651A1, US2016/0096892A1, US2014/0322275A1, or WO2015/090230, incorporated herein by reference). In one embodiment, the antigen binding domain comprises a heavy chain variable region and/or a variable light chain region of an antibody listed above.

[0375] In embodiments, the antigen binding domain is an antigen binding domain described in WO2015/142675, US-2015-0283178-A1, US-2016-0046724-A1, US2014/0322212A1, US2016/0068601A1, US2016/0051651A1, US2016/0096892A1, US2014/0322275A1, or WO2015/090230, incorporated herein by reference.

[0376] In embodiments, the antigen binding domain targets BCMA and is described in US-2016-0046724-A1.

[0377] In embodiments, the antigen binding domain targets CD19 and is described in US-2015-0283178-A1.

[0378] In embodiments, the antigen binding domain targets CD123 and is described in US2014/0322212A1, US2016/0068601A1.

[0379] In embodiments, the antigen binding domain targets CLL and is described in US2016/0051651A1.

[0380] In embodiments, the antigen binding domain targets CD33 and is described in US2016/0096892A1.

[0381] Exemplary target antigens that can be targeted using the CAR-expressing cells, include, but are not limited to, CD19, CD123, EGFRvIII, CD33, mesothelin, BCMA, and GFR ALPHA-4, among others, as described in, for example, WO2014/153270, WO 2014/130635, WO2016/028896, WO 2014/130657, WO2016/014576, WO 2015/090230, WO2016/014565, WO2016/014535, and WO2016/025880, each of which is herein incorporated by reference in its entirety.

[0382] In other embodiments, the CAR-expressing cells can specifically bind to humanized CD19, e.g., can include a CAR molecule, or an antigen binding domain (e.g., a humanized antigen binding domain) according to Table 3 of WO2014/153270, incorporated herein by reference. The amino acid and nucleotide sequences encoding the CD19 CAR molecules and antigen binding domains (e.g., including one, two, three VH CDRs; and one, two, three VL CDRs according to Kabat or Chothia), are specified in WO2014/153270.

[0383] In other embodiments, the CAR-expressing cells can specifically bind to CD123, e.g., can include a CAR molecule (e.g., any of the CAR1 to CAR8), or an antigen binding domain according to Tables 1-2 of WO 2014/130635, incorporated herein by reference. The amino acid and nucleotide sequences encoding the CD123 CAR molecules and antigen binding domains (e.g., including one, two, three VH CDRs; and one, two, three VL CDRs according to Kabat or Chothia), are specified in WO 2014/130635.

[0384] In other embodiments, the CAR-expressing cells can specifically bind to CD123, e.g., can include a CAR molecule (e.g., any of the CAR123-1 ro CAR123-4 and hzCAR123-1 to hzCAR123-32), or an antigen binding domain according to Tables 2, 6, and 9 of WO2016/028896, incorporated herein by reference. The amino acid and nucleotide sequences encoding the CD123 CAR molecules and antigen binding domains (e.g., including one, two, three VH CDRs; and one, two, three VL CDRs according to Kabat or Chothia), are specified in WO2016/028896.

[0385] In other embodiments, the CAR-expressing cells can specifically bind to EGFRvIII, e.g., can include a CAR molecule, or an antigen binding domain according to Table 2 or SEQ ID NO:11 of WO 2014/130657, incorporated herein by reference. The amino acid and nucleotide sequences encoding the EGFRvIII CAR molecules and antigen binding domains (e.g., including one, two, three VH CDRs; and one, two, three VL CDRs according to Kabat or Chothia), are specified in WO 2014/130657.

[0386] In other embodiments, the CAR-expressing cells can specifically bind to CD33, e.g., can include a CAR molecule (e.g., any of CAR33-1 to CAR-33-9), or an antigen binding domain according to Table 2 or 9 of WO2016/014576, incorporated herein by reference. The amino acid and nucleotide sequences encoding the CD33 CAR molecules and antigen binding domains (e.g., including one, two, three VH CDRs; and one, two, three VL CDRs according to Kabat or Chothia), are specified in WO2016/014576.

[0387] In other embodiments, the CAR-expressing cells can specifically bind to mesothelin, e.g., can include a CAR molecule, or an antigen binding domain according to Tables 2-3 of WO 2015/090230, incorporated herein by reference. The amino acid and nucleotide sequences encoding the mesothelin CAR molecules and antigen binding domains (e.g., including one, two, three VH CDRs; and one, two, three VL CDRs according to Kabat or Chothia), are specified in WO 2015/090230.

[0388] In other embodiments, the CAR-expressing cells can specifically bind to BCMA, e.g., can include a CAR molecule, or an antigen binding domain according to Table 1 or 16, SEQ ID NO: 271 or SEQ ID NO: 273 of WO2016/014565, incorporated herein by reference. The amino acid and nucleotide sequences encoding the BCMA CAR molecules and antigen binding domains (e.g., including one, two, three VH CDRs; and one, two, three VL CDRs according to Kabat or Chothia), are specified in WO2016/014565.

[0389] In other embodiments, the CAR-expressing cells can specifically bind to CLL-1, e.g., can include a CAR molecule, or an antigen binding domain according to Table 2 of WO2016/014535, incorporated herein by reference. The amino acid and nucleotide sequences encoding the CLL-1 CAR molecules and antigen binding domains (e.g., including one, two, three VH CDRs; and one, two, three VL CDRs according to Kabat or Chothia), are specified in WO2016/014535.

[0390] In other embodiments, the CAR-expressing cells can specifically bind to GFR ALPHA-4, e.g., can include a CAR molecule, or an antigen binding domain according to Table 2 of WO2016/025880, incorporated herein by reference. The amino acid and nucleotide sequences encoding the GFR ALPHA-4 CAR molecules and antigen binding domains (e.g., including one, two, three VH CDRs; and one, two, three VL CDRs according to Kabat or Chothia), are specified in WO2016/025880.

[0391] In one embodiment, the antigen binding domain of any of the CAR molecules described herein (e.g., any of CD19, CD123, EGFRvIII, CD33, mesothelin, BCMA, and GFR ALPHA-4) comprises one, two three (e.g., all three) heavy chain CDRs, HC CDR1, HC CDR2 and HC CDR3, from an antibody listed above, and/or one, two, three (e.g., all three) light chain CDRs, LC CDR1, LC CDR2 and LC CDR3, from an antigen binding domain listed above. In one embodiment, the antigen binding domain comprises a heavy chain variable region and/or a variable light chain region of an antibody listed or described above.

[0392] In another aspect, the antigen binding domain comprises a humanized antibody or an antibody fragment. In some aspects, a non-human antibody is humanized, where specific sequences or regions of the antibody are modified to increase similarity to an antibody naturally produced in a human or fragment thereof. In one aspect, the antigen binding domain is humanized.

[0393] In some instances, it is beneficial for the antigen binding domain to be derived from the same species in which the CAR will ultimately be used in. For example, for use in humans, it may be beneficial for the antigen binding domain of the CAR to comprise human or humanized residues for the antigen binding domain of an antibody or antibody fragment. Thus, in one aspect, the antigen binding domain comprises a human antibody or an antibody fragment.

[0394] CD123 Binding Domain

[0395] In one embodiment, the human CD123 binding domain comprises one or more (e.g., all three) light chain complementary determining region 1 (LC CDR1), light chain complementary determining region 2 (LC CDR2), and light chain complementary determining region 3 (LC CDR3) of a human CD123 binding domain described herein, and/or one or more (e.g., all three) heavy chain complementary determining region 1 (HC CDR1), heavy chain complementary determining region 2 (HC CDR2), and heavy chain complementary determining region 3 (HC CDR3) of a human CD123 binding domain described herein, e.g., a human CD123 binding domain comprising one or more, e.g., all three, LC CDRs and one or more, e.g., all three, HC CDRs. In one embodiment, the human CD123 binding domain comprises one or more (e.g., all three) heavy chain complementary determining region 1 (HC CDR1), heavy chain complementary determining region 2 (HC CDR2), and heavy chain complementary determining region 3 (HC CDR3) of a human CD123 binding domain described herein, e.g., the human CD123 binding domain has two variable heavy chain regions, each comprising a HC CDR1, a HC CDR2 and a HC CDR3 described herein. In one embodiment, the human CD123 binding domain comprises a human light chain variable region described herein (e.g., in Table 11A or 12B) and/or a human heavy chain variable region described herein (e.g., in 11A or 12B). In one embodiment, the human CD123 binding domain comprises a human heavy chain variable region described herein (e.g., in Table 11A or 12B 9), e.g., at least two human heavy chain variable regions described herein (e.g., in Table 11A or 12B). In one embodiment, the CD123 binding domain is a scFv comprising a light chain and a heavy chain of an amino acid sequence of Table 11A or 12B. In an embodiment, the CD123 binding domain (e.g., an scFv) comprises: a light chain variable region comprising an amino acid sequence having at least one, two or three modifications (e.g., substitutions) but not more than 30, 20 or 10 modifications (e.g., substitutions) of an amino acid sequence of a light chain variable region provided in Table 11A or 12B, or a sequence with at least 95% identity, e.g., 95-99% identity, with an amino acid sequence of Table 11A; and/or a heavy chain variable region comprising an amino acid sequence having at least one, two or three modifications (e.g., substitutions) but not more than 30, 20 or 10 modifications (e.g., substitutions) of an amino acid sequence of a heavy chain variable region provided in Table 11A or 12B, or a sequence with at least 95% identity, e.g., 95-99% identity, to an amino acid sequence of Table 11A or 12B. In one embodiment, the human CD123 binding domain comprises a sequence selected from a group consisting of SEQ ID NO:157-160, 478, 480, 483, and 485, or a sequence with at least 95% identity, e.g., 95-99% identity, thereof. In one embodiment, the human CD123 binding domain is a scFv, and a light chain variable region comprising an amino acid sequence described herein, e.g., in Table 11A or 12B, is attached to a heavy chain variable region comprising an amino acid sequence described herein, e.g., in Table 11A, via a linker, e.g., a linker described herein. In one embodiment, the human CD123 binding domain includes a (Gly₄-Ser)n linker, wherein n is 1, 2, 3, 4, 5, or 6, preferably 3 or 4 (SEQ ID NO:26). The light chain variable region and heavy chain variable region of a scFv can be, e.g., in any of the following orientations: light chain variable region-linker-heavy chain variable region or heavy chain variable region-linker-light chain variable region.

[0396] In some aspects, a non-human antibody is humanized, where specific sequences or regions of the antibody are modified to increase similarity to an antibody naturally produced in a human or fragment thereof. Thus, in one aspect, the antigen binding domain comprises a humanized antibody or an antibody fragment. In one embodiment, the humanized CD123 binding domain comprises one or more (e.g., all three) light chain complementary determining region 1 (LC CDR1), light chain complementary determining region 2 (LC CDR2), and light chain complementary determining region 3 (LC CDR3) of a humanized CD123 binding domain described herein, and/or one or more (e.g., all three) heavy chain complementary determining region 1 (HC CDR1), heavy chain complementary determining region 2 (HC CDR2), and heavy chain complementary determining region 3 (HC CDR3) of a humanized CD123 binding domain described herein, e.g., a humanized CD123 binding domain comprising one or more, e.g., all three, LC CDRs and one or more, e.g., all three, HC CDRs. In one embodiment, the humanized CD123 binding domain comprises one or more (e.g., all three) heavy chain complementary determining region 1 (HC CDR1), heavy chain complementary determining region 2 (HC CDR2), and heavy chain complementary determining region 3 (HC CDR3) of a humanized CD123 binding domain described herein, e.g., the humanized CD123 binding domain has two variable heavy chain regions, each comprising a HC CDR1, a HC CDR2 and a HC CDR3 described herein. In one embodiment, the humanized CD123 binding domain comprises a humanized light chain variable region described herein (e.g., in Table 12A) and/or a humanized heavy chain variable region described herein (e.g., in Table 12A). In one embodiment, the humanized CD123 binding domain comprises a humanized heavy chain variable region described herein (e.g., in Table 12A), e.g., at least two humanized heavy chain variable regions described herein (e.g., in Table 12A). In one embodiment, the CD123 binding domain is a scFv comprising a light chain and a heavy chain of an amino acid sequence of Table 12A. In an embodiment, the CD123 binding domain (e.g., an scFv) comprises: a light chain variable region comprising an amino acid sequence having at least one, two or three modifications (e.g., substitutions) but not more than 30, 20 or 10 modifications (e.g., substitutions) of an amino acid sequence of a light chain variable region provided in Table 4, or a sequence with at least 95% identity, e.g., 95-99% identity, with an amino acid sequence of Table 12A; and/or a heavy chain variable region comprising an amino acid sequence having at least one, two or three modifications (e.g., substitutions) but not more than 30, 20 or 10 modifications (e.g., substitutions) of an amino acid sequence of a heavy chain variable region provided in Table 12A, or a sequence with at least 95% identity, e.g., 95-99% identity, to an amino acid sequence of Table 12A. In one embodiment, the humanized CD123 binding domain comprises a sequence selected from a group consisting of SEQ ID NO:184-215 and 302-333, or a sequence with at least 95% identity, e.g., 95-99% identity, thereof. In one embodiment, the humanized CD123 binding domain is a scFv, and a light chain variable region comprising an amino acid sequence described herein, e.g., in Table 12A, is attached to a heavy chain variable region comprising an amino acid sequence described herein, e.g., in Table 12A, via a linker, e.g., a linker described herein. In one embodiment, the humanized CD123 binding domain includes a (Gly4-Ser)n linker, wherein n is 1, 2, 3, 4, 5, or 6, preferably 3 or 4 (SEQ ID NO:26). The light chain variable region and heavy chain variable region of a scFv can be, e.g., in any of the following orientations: light chain variable region-linker-heavy chain variable region or heavy chain variable region-linker-light chain variable region.

### Humanized Antibody

[0397] A humanized antibody can be produced using a variety of techniques known in the art, including but not limited to, CDR-grafting (see, e.g., European Patent No. EP 239,400; International Publication No. WO 91/09967; and U.S. Pat. Nos. 5,225,539, 5,530,101, and 5,585,089, each of which is incorporated herein in its entirety by reference), veneering or resurfacing (see, e.g., European Patent Nos. EP 592,106 and EP 519,596; Padlan, 1991, Molecular Immunology, 28(4/5):489-498; Studnicka et al., 1994, Protein Engineering, 7(6):805-814; and Roguska et al., 1994, PNAS, 91:969-973, each of which is incorporated herein by its entirety by reference), chain shuffling (see, e.g., U.S. Pat. No. 5,565,332, which is incorporated herein in its entirety by reference), and techniques disclosed in, e.g., U.S. Patent Application Publication No. US2005/0042664, U.S. Patent Application Publication No. US2005/0048617, U.S. Pat. Nos. 6,407,213, 5,766,886, International Publication No. WO 9317105, Tan et al., J. Immunol., 169:1119-25 (2002), Caldas et al., Protein Eng., 13(5):353-60 (2000), Morea et al., Methods, 20(3):267-79 (2000), Baca et al., J. Biol. Chem., 272(16):10678-84 (1997), Roguska et al., Protein Eng., 9(10):895-904 (1996), Couto et al., Cancer Res., 55 (23 Supp):5973s-5977s (1995), Couto et al., Cancer Res., 55(8):1717-22 (1995), Sandhu J S, Gene, 150(2):409-10 (1994), and Pedersen et al., J. Mol. Biol., 235(3):959-73 (1994), each of which is incorporated herein in its entirety by reference. Often, framework residues in the framework regions will be substituted with the corresponding residue from the CDR donor antibody to alter, for example improve, antigen binding. These framework substitutions are identified by methods well-known in the art, e.g., by modeling of the interactions of the CDR and framework residues to identify framework residues important for antigen binding and sequence comparison to identify unusual framework residues at particular positions. (See, e.g., Queen et al., U.S. Pat. No. 5,585,089; and Riechmann et al., 1988, Nature, 332:323, which are incorporated herein by reference in their entireties.)

[0398] A humanized antibody or antibody fragment has one or more amino acid residues remaining in it from a source which is nonhuman. These nonhuman amino acid residues are often referred to as “import” residues, which are typically taken from an “import” variable domain. As provided herein, humanized antibodies or antibody fragments comprise one or more CDRs from nonhuman immunoglobulin molecules and framework regions wherein the amino acid residues comprising the framework are derived completely or mostly from human germline. Multiple techniques for humanization of antibodies or antibody fragments are well-known in the art and can essentially be performed following the method of Winter and co-workers (Jones et al., Nature, 321:522-525 (1986); Riechmann et al., Nature, 332:323-327 (1988); Verhoeyen et al., Science, 239:1534-1536 (1988)), by substituting rodent CDRs or CDR sequences for the corresponding sequences of a human antibody, i.e., CDR-grafting (EP 239,400; PCT Publication No. WO 91/09967; and U.S. Pat. Nos. 4,816,567; 6,331,415; 5,225,539; 5,530,101; 5,585,089; 6,548,640, the contents of which are incorporated herein by reference herein in their entirety). In such humanized antibodies and antibody fragments, substantially less than an intact human variable domain has been substituted by the corresponding sequence from a nonhuman species. Humanized antibodies are often human antibodies in which some CDR residues and possibly some framework (FR) residues are substituted by residues from analogous sites in rodent antibodies. Humanization of antibodies and antibody fragments can also be achieved by veneering or resurfacing (EP 592,106; EP 519,596; Padlan, 1991, Molecular Immunology, 28(4/5):489-498; Studnicka et al., Protein Engineering, 7(6):805-814 (1994); and Roguska et al., PNAS, 91:969-973 (1994)) or chain shuffling (U.S. Pat. No. 5,565,332), the contents of which are incorporated herein by reference herein in their entirety.

[0399] The choice of human variable domains, both light and heavy, to be used in making the humanized antibodies is to reduce antigenicity. According to the so-called “best-fit” method, the sequence of the variable domain of a rodent antibody is screened against the entire library of known human variable-domain sequences. The human sequence which is closest to that of the rodent is then accepted as the human framework (FR) for the humanized antibody (Sims et al., J. Immunol., 151:2296 (1993); Chothia et al., J. Mol. Biol., 196:901 (1987), the contents of which are incorporated herein by reference herein in their entirety). Another method uses a particular framework derived from the consensus sequence of all human antibodies of a particular subgroup of light or heavy chains. The same framework may be used for several different humanized antibodies (see, e.g., Nicholson et al. Mol. Immun. 34 (16-17): 1157-1165 (1997); Carter et al., Proc. Natl. Acad. Sci. USA, 89:4285 (1992); Presta et al., J. Immunol., 151:2623 (1993), the contents of which are incorporated herein by reference herein in their entirety). In some embodiments, the framework region, e.g., all four framework regions, of the heavy chain variable region are derived from a VH4_4-59 germline sequence. In one embodiment, the framework region can comprise, one, two, three, four or five modifications, e.g., substitutions, e.g., from the amino acid at the corresponding murine sequence. In one embodiment, the framework region, e.g., all four framework regions of the light chain variable region are derived from a VK3_1.25 germline sequence. In one embodiment, the framework region can comprise, one, two, three, four or five modifications, e.g., substitutions, e.g., from the amino acid at the corresponding murine sequence.

[0400] In some aspects, the portion of a CAR composition of the invention that comprises an antibody fragment is humanized with retention of high affinity for the target antigen and other favorable biological properties. According to one aspect of the invention, humanized antibodies and antibody fragments are prepared by a process of analysis of the parental sequences and various conceptual humanized products using three-dimensional models of the parental and humanized sequences. Three-dimensional immunoglobulin models are commonly available and are familiar to those skilled in the art. Computer programs are available which illustrate and display probable three-dimensional conformational structures of selected candidate immunoglobulin sequences. Inspection of these displays permits analysis of the likely role of the residues in the functioning of the candidate immunoglobulin sequence, e.g., the analysis of residues that influence the ability of the candidate immunoglobulin to bind the target antigen. In this way, FR residues can be selected and combined from the recipient and import sequences so that the desired antibody or antibody fragment characteristic, such as increased affinity for the target antigen, is achieved. In general, the CDR residues are directly and most substantially involved in influencing antigen binding.

[0401] A humanized antibody or antibody fragment may retain a similar antigenic specificity as the original antibody, e.g., in the present invention, the ability to bind an antigen described herein, e.g., tumor antigen, e.g., B cell antigen, e.g., human CD123, CD19, or a fragment thereof. In some embodiments, a humanized antibody or antibody fragment may have improved affinity and/or specificity of binding to the antigen, e.g., tumor antigen, e.g., B cell antigen, e.g., human CD123, CD19, or a fragment thereof.

[0402] In one aspect, the antigen binding domain portion comprises one or more sequence selected from SEQ ID NOS:157-160, 184-215, 478, 480, 483, 485, and 556-587. In one aspect, the CD123 CAR that includes a human CD123 binding domain is selected from one or more sequence selected from SEQ ID NOS:157-160, 478, 480, 483, and 485. In one aspect, the CD123 CAR that includes a humanized CD123 binding domain is selected from one or more sequence selected from SEQ ID NOS:184-215 and 556-587.

[0403] In one aspect, the antigen binding domain (e.g., tumor antigen binding domain, e.g., B cell antigen binding domain, e.g., CD123 binding domain or CD19 binding domain) is characterized by particular functional features or properties of an antibody or antibody fragment. For example, in one aspect, the portion of a CAR composition of the invention that comprises an antigen binding domain specifically binds the antigen (e.g., tumor antigen, e.g., B cell antigen, e.g., human CD123, CD19, or a fragment thereof). In one aspect, the invention relates to an antigen binding domain comprising an antibody or antibody fragment, wherein the antibody binding domain specifically binds to a CD123 protein or fragment thereof, wherein the antibody or antibody fragment comprises a variable light chain and/or a variable heavy chain that includes an amino acid sequence of SEQ ID NO: 157-160, 184-215, 478, 480, 483, 485, and 556-587. In one aspect, the antigen binding domain comprises an amino acid sequence of an scFv selected from SEQ ID NO: 157-160, 184-215, 478, 480, 483, 485, and 556-587. In certain aspects, the scFv is contiguous with and in the same reading frame as a leader sequence. In one aspect the leader sequence is the polypeptide sequence provided as SEQ ID NO:1.

### Antigen Binding Domain—Additional Embodiments

[0404] In one aspect, the antigen binding domain (e.g., tumor antigen binding domain, e.g., B cell antigen binding domain, e.g., CD123 binding domain or CD19 binding domain) is a fragment, e.g., a single chain variable fragment (scFv). In one aspect, the antigen binding domain (e.g., tumor antigen binding domain, e.g., B cell antigen binding domain, e.g., CD123 binding domain or CD19 binding domain) is a Fv, a Fab, a (Fab′)2, or a bi-functional (e.g. bi-specific) hybrid antibody (e.g., Lanzavecchia et al., Eur. J. Immunol. 17, 105 (1987)). In one aspect, the antibodies and fragments thereof of the invention binds an antigen (e.g., tumor antigen, e.g., B cell antigen, e.g., CD123 or CD19 protein) or fragment thereof with wild-type or enhanced affinity.

[0405] In some instances, a human scFv can be derived from a display library. A display library is a collection of entities; each entity includes an accessible polypeptide component and a recoverable component that encodes or identifies the polypeptide component. The polypeptide component is varied so that different amino acid sequences are represented. The polypeptide component can be of any length, e.g. from three amino acids to over 300 amino acids. A display library entity can include more than one polypeptide component, for example, the two polypeptide chains of a Fab. In one exemplary embodiment, a display library can be used to identify a human CD123 binding domain. In a selection, the polypeptide component of each member of the library is probed with CD123, or a fragment thereof, and if the polypeptide component binds to CD123, the display library member is identified, typically by retention on a support.

[0406] Retained display library members are recovered from the support and analyzed. The analysis can include amplification and a subsequent selection under similar or dissimilar conditions. For example, positive and negative selections can be alternated. The analysis can also include determining the amino acid sequence of the polypeptide component, i.e., the anti-CD123 binding domain, and purification of the polypeptide component for detailed characterization.

[0407] A variety of formats can be used for display libraries. Examples include the phaage display. In phage display, the protein component is typically covalently linked to a bacteriophage coat protein. The linkage results from translation of a nucleic acid encoding the protein component fused to the coat protein. The linkage can include a flexible peptide linker, a protease site, or an amino acid incorporated as a result of suppression of a stop codon. Phage display is described, for example, in U.S. Pat. No. 5,223,409; Smith (1985) Science 228:1315-1317; WO 92/18619; WO 91/17271; WO 92/20791; WO 92/15679; WO 93/01288; WO 92/01047; WO 92/09690; WO 90/02809; de Haard et al. (1999) J. Biol. Chem 274:18218-30; Hoogenboom et al. (1998) Immunotechnology 4:1-20; Hoogenboom et al. (2000) Immunol Today 2:371-8 and Hoet et al. (2005) Nat Biotechnol. 23(3)344-8. Bacteriophage displaying the protein component can be grown and harvested using standard phage preparatory methods, e.g. PEG precipitation from growth media. After selection of individual display phages, the nucleic acid encoding the selected protein components can be isolated from cells infected with the selected phages or from the phage themselves, after amplification. Individual colonies or plaques can be picked, the nucleic acid isolated and sequenced.

[0408] Other display formats include cell based display (see, e.g., WO 03/029456), protein-nucleic acid fusions (see, e.g., U.S. Pat. No. 6,207,446), ribosome display (See, e.g., Mattheakis et al. (1994) Proc. Natl. Acad. Sci. USA 91:9022 and Hanes et al. (2000) Nat Biotechnol. 18:1287-92; Hanes et al. (2000) Methods Enzymol. 328:404-30; and Schaffitzel et al. (1999) J Immunol Methods. 231(1-2):119-35), and E. coli periplasmic display (2005 Nov. 22; PMID: 16337958).

[0409] In some instances, scFvs can be prepared according to method known in the art (see, for example, Bird et al., (1988) Science 242:423-426 and Huston et al., (1988) Proc. Natl. Acad. Sci. USA 85:5879-5883). ScFv molecules can be produced by linking VH and VL regions together using flexible polypeptide linkers. The scFv molecules comprise a linker (e.g., a Ser-Gly linker) with an optimized length and/or amino acid composition. The linker length can greatly affect how the variable regions of a scFv fold and interact. In fact, if a short polypeptide linker is employed (e.g., between 5-10 amino acids) intrachain folding is prevented. Interchain folding is also required to bring the two variable regions together to form a functional epitope binding site. For examples of linker orientation and size see, e.g., Hollinger et al. 1993 Proc Natl Acad. Sci. U.S.A. 90:6444-6448, U.S. Patent Application Publication Nos. 2005/0100543, 2005/0175606, 2007/0014794, and PCT publication Nos. WO2006/020258 and WO2007/024715, is incorporated herein by reference.

[0410] An scFv can comprise a linker of at least 1, 2, 3, 4, 5, 6, 7, 8, 9, 10, 11, 12, 13, 14, 15, 16, 17, 18, 19, 20, 25, 30, 35, 40, 45, 50, or more amino acid residues between its VL and VH regions. The linker sequence may comprise any naturally occurring amino acid. In some embodiments, the linker sequence comprises amino acids glycine and serine. In another embodiment, the linker sequence comprises sets of glycine and serine repeats such as (Gly₄Ser)n, where n is a positive integer equal to or greater than 1 (SEQ ID NO:25). In one embodiment, the linker can be (Gly₄Ser)₄ (SEQ ID NO:27) or (Gly₄Ser)₃(SEQ ID NO:28). Variation in the linker length may retain or enhance activity, giving rise to superior efficacy in activity studies.

### Exemplary CD123 CAR Constructs and Antigen Binding Domains

[0411] Exemplary CD123 CAR constructs disclose herein comprise an scFv (e.g., a human scFv as disclosed in Tables 11A, 12A and 12B herein, optionally preceded with an optional leader sequence (e.g., SEQ ID NO:1 and SEQ ID NO:12 for exemplary leader amino acid and nucleotide sequences, respectively). The sequences of the human scFv fragments (amino acid sequences of SEQ ID NOs:157-160) are provided herein in Table 11A. The sequences of human scFv fragments, without the leader sequence, are provided herein in Table 12B (SEQ ID NOs: 479, 481, 482, and 484 for the nucleotide sequences, and SEQ ID NOs: 478, 480, 483, and 485 for the amino acid sequences). The CD123 CAR construct can further include an optional hinge domain, e.g., a CD8 hinge domain (e.g., including the amino acid sequence of SEQ ID NO: 2 or encoded by a nucleic acid sequence of SEQ ID NO:13); a transmembrane domain, e.g., a CD8 transmembrane domain (e.g., including the amino acid sequence of SEQ ID NO: 6 or encoded by the nucleotide sequence of SEQ ID NO: 17); an intracellular domain, e.g., a 4-1BB intracellular domain (e.g., including the amino acid sequence of SEQ ID NO: 7 or encoded by the nucleotide sequence of SEQ ID NO: 18; and a functional signaling domain, e.g., a CD3 zeta domain (e.g., including amino acid sequence of SEQ ID NO: 9 or 10, or encoded by the nucleotide sequence of SEQ ID NO: 20 or 21). In certain embodiments, the domains are contiguous with and in the same reading frame to form a single fusion protein. In other embodiments, the domain are in separate polypeptides, e.g., as in an RCAR molecule as described herein.

[0412] In certain embodiments, the full length CD123 CAR molecule includes the amino acid sequence of, or is encoded by the nucleotide sequence of, CD123-1, CD123-2, CD123-3, CD123-4, hzCD123-1, hzCD123-2, hzCD123-3, hzCD123-4, hzCD123-5, hzCD123-6, hzCD123-7, hzCD123-8, hzCD123-9, hzCD123-10, hzCD123-11, hzCD123-12, hzCD123-13, hzCD123-14, hzCD123-15, hzCD123-16, hzCD123-17, hzCD123-18, hzCD123-19, hzCD123-20, hzCD123-21, hzCD123-22, hzCD123-23, hzCD123-24, hzCD123-25, hzCD123-26, hzCD123-27, hzCD123-28, hzCD123-29, hzCD123-30, hzCD123-31, or hzCD123-32, provided in Table 11A, 12A or 12B, or a sequence substantially identical (e.g., with at least 95% identity, e.g., 95-99% identity) thereto.

[0413] In certain embodiments, the CD123 CAR molecule, or the CD123 antigen binding domain, includes the scFv amino acid sequence of CD123-1, CD123-2, CD123-3, CD123-4, hzCD123-1, hzCD123-2, hzCD123-3, hzCD123-4, hzCD123-5, hzCD123-6, hzCD123-7, hzCD123-8, hzCD123-9, hzCD123-10, hzCD123-11, hzCD123-12, hzCD123-13, hzCD123-14, hzCD123-15, hzCD123-16, hzCD123-17, hzCD123-18, hzCD123-19, hzCD123-20, hzCD123-21, hzCD123-22, hzCD123-23, hzCD123-24, hzCD123-25, hzCD123-26, hzCD123-27, hzCD123-28, hzCD123-29, hzCD123-30, hzCD123-31, or hzCD123-32, provided in Table 11A, 12A or 12B; or includes the scFv amino acid sequence of, or is encoded by the nucleotide sequence of, CD123-1, CD123-2, CD123-3, CD123-4, hzCD123-1, hzCD123-2, hzCD123-3, hzCD123-4, hzCD123-5, hzCD123-6, hzCD123-7, hzCD123-8, hzCD123-9, hzCD123-10, hzCD123-11, hzCD123-12, hzCD123-13, hzCD123-14, hzCD123-15, hzCD123-16, hzCD123-17, hzCD123-18, hzCD123-19, hzCD123-20, hzCD123-21, hzCD123-22, hzCD123-23, hzCD123-24, hzCD123-25, hzCD123-26, hzCD123-27, hzCD123-28, hzCD123-29, hzCD123-30, hzCD123-31, or hzCD123-32, or a sequence substantially identical (e.g., with at least 95% identity, e.g., 95-99% identity, or up to 20, 15, 10, 8, 6, 5, 4, 3, 2, or 1 amino acid changes) to any of the aforesaid sequences.

[0414] In certain embodiments, the CD123 CAR molecule, or the CD123 antigen binding domain, includes the heavy chain variable region and/or the light chain variable region of CD123-1, CD123-2, CD123-3, CD123-4, hzCD123-1, hzCD123-2, hzCD123-3, hzCD123-4, hzCD123-5, hzCD123-6, hzCD123-7, hzCD123-8, hzCD123-9, hzCD123-10, hzCD123-11, hzCD123-12, hzCD123-13, hzCD123-14, hzCD123-15, hzCD123-16, hzCD123-17, hzCD123-18, hzCD123-19, hzCD123-20, hzCD123-21, hzCD123-22, hzCD123-23, hzCD123-24, hzCD123-25, hzCD123-26, hzCD123-27, hzCD123-28, hzCD123-29, hzCD123-30, hzCD123-31, or hzCD123-32, provided in Table 11A or 12A, or a sequence substantially identical (e.g., with at least 95% identity, e.g., 95-99% identity, or up to 20, 15, 10, 8, 6, 5, 4, 3, 2, or 1 amino acid changes) to any of the aforesaid sequences.

[0415] In certain embodiments, the CD123 CAR molecule, or the CD123 antigen binding domain, includes one, two or three CDRs from the heavy chain variable region (e.g., HCDR1, HCDR2 and/or HCDR3), provided in Table 1A or 3A; and/or one, two or three CDRs from the light chain variable region (e.g., LCDR1, LCDR2 and/or LCDR3) of CD123-1, CD123-2, CD123-3, CD123-4, hzCD123-1, hzCD123-2, hzCD123-3, hzCD123-4, hzCD123-5, hzCD123-6, hzCD123-7, hzCD123-8, hzCD123-9, hzCD123-10, hzCD123-11, hzCD123-12, hzCD123-13, hzCD123-14, hzCD123-15, hzCD123-16, hzCD123-17, hzCD123-18, hzCD123-19, hzCD123-20, hzCD123-21, hzCD123-22, hzCD123-23, hzCD123-24, hzCD123-25, hzCD123-26, hzCD123-27, hzCD123-28, hzCD123-29, hzCD123-30, hzCD123-31, or hzCD123-32, provided in Table 2A or 4A; or a sequence substantially identical (e.g., at least 95% identical, e.g., 95-99% identical, or up to 5, 4, 3, 2, or 1 amino acid changes) to any of the aforesaid sequences.

[0416] In certain embodiments, the CD123 CAR molecule, or the CD123 antigen binding domain, includes one, two or three CDRs from the heavy chain variable region (e.g., HCDR1, HCDR2 and/or HCDR3), provided in Table 5A; and/or one, two or three CDRs from the light chain variable region (e.g., LCDR1, LCDR2 and/or LCDR3) of CD123-1, CD123-2, CD123-3, CD123-4, hzCD123-1, hzCD123-2, hzCD123-3, hzCD123-4, hzCD123-5, hzCD123-6, hzCD123-7, hzCD123-8, hzCD123-9, hzCD123-10, hzCD123-11, hzCD123-12, hzCD123-13, hzCD123-14, hzCD123-15, hzCD123-16, hzCD123-17, hzCD123-18, hzCD123-19, hzCD123-20, hzCD123-21, hzCD123-22, hzCD123-23, hzCD123-24, hzCD123-25, hzCD123-26, hzCD123-27, hzCD123-28, hzCD123-29, hzCD123-30, hzCD123-31, or hzCD123-32, provided in Table 6A; or a sequence substantially identical (e.g., at least 95% identical, e.g., 95-99% identical, or up to 5, 4, 3, 2, or 1 amino acid changes) to any of the aforesaid sequences.

[0417] In certain embodiments, the CD123 molecule, or the CD123 antigen binding domain, includes one, two or three CDRs from the heavy chain variable region (e.g., HCDR1, HCDR2 and/or HCDR3), provided in Table 7A; and/or one, two or three CDRs from the light chain variable region (e.g., LCDR1, LCDR2 and/or LCDR3) of CD123-1, CD123-2, CD123-3, CD123-4, hzCD123-1, hzCD123-2, hzCD123-3, hzCD123-4, hzCD123-5, hzCD123-6, hzCD123-7, hzCD123-8, hzCD123-9, hzCD123-10, hzCD123-11, hzCD123-12, hzCD123-13, hzCD123-14, hzCD123-15, hzCD123-16, hzCD123-17, hzCD123-18, hzCD123-19, hzCD123-20, hzCD123-21, hzCD123-22, hzCD123-23, hzCD123-24, hzCD123-25, hzCD123-26, hzCD123-27, hzCD123-28, hzCD123-29, hzCD123-30, hzCD123-31, or hzCD123-32, provided in Table 8A; or a sequence substantially identical (e.g., at least 95% identical, e.g., 95-99% identical, or up to 5, 4, 3, 2, or 1 amino acid changes) to any of the aforesaid sequences.

[0418] The sequences of CDR sequences of the scFv domains are shown in Tables, 3A, 5A, and 7A for the heavy chain variable domains and in Tables 2A, 4A, 6A, and 8A for the light chain variable domains. “ID” stands for the respective SEQ ID NO for each CDR.

[0419] The CDRs provided in Tables 1A, 2A, 3A, and 4A are according to a combination of the Kabat and Chothia numbering scheme.

TABLE 1A
Heavy Chain Variable Domain CDRs

| Candidate | HCDR1 | ID | HCDR2 | ID | HCDR3 | ID |
|---|---|---|---|---|---|---|
| CAR123-2 | GYTFTGYYMH | 335 | WINPNSGGTNYAQKFQG | 363 | DMNILATVPFDI | 391 |
| CAR123-3 | GYIFTGYYIH | 337 | WINPNSGGTNYAQKFQG | 364 | DMNILATVPFDI | 392 |
| CAR123-4 | GYTFTGYYMH | 336 | WINPNSGGTNYAQKFQG | 365 | DMNILATVPFDI | 393 |
| CAR123-1 | GYTFTDYYMH | 334 | WINPNSGDTNYAQKFQG | 362 | DMNILATVPFDI | 390 |

TABLE 2A
Light Chain Variable Domain CDRs

| Candidate | LCDR1 | ID | LCDR2 | ID | LCDR3 | ID |
|---|---|---|---|---|---|---|
| CAR123-2 | RASQSISSYLN | 419 | AAFSLQS | 447 | QQGDSVPLT | 475 |
| CAR123-3 | RASQSISSYLN | 420 | AASSLQS | 448 | QQGDSVPLT | 476 |
| CAR123-4 | RASQSISSYLN | 421 | AASSLQS | 449 | QQGDSVPLT | 477 |
| CAR123-1 | RASQSISTYLN | 418 | AASSLQS | 446 | QQGDSVPLT | 474 |

TABLE 3A
Heavy Chain Variable Domain CDR

| | HCDR1 | ID | HCDR2 | ID | HCDR3 | ID |
|---|---|---|---|---|---|---|
| hzCAR123 | GYTFTSYWMN | 361 | RIDPYDSETHYNQK | 389 | GNWDDY | 417 |
| | | | FKD | | | |

TABLE 4A
Light Chain Variable Domain CDR

| | LCDR1 | ID | LCDR2 | ID | LCDR3 | ID |
|---|---|---|---|---|---|---|
| hzCAR123 | RASKSISKDLA | 445 | SGSTLQS | 473 | QQHNKYPYT | 47 |

TABLE 5A
Heavy Chain Variable Domain CDRs according to the Kabat
numbering scheme (Kabat et al. (1991), “Sequences of
Proteins of Immunological Interest,” 5th Ed. Public
Health Service, National Institutes of Health, Bethesda, MD)

| Candidate | HCDR1 | ID | HCDR2 | ID | HCDR3 | ID |
|---|---|---|---|---|---|---|
| CAR123-2 | GYYMH | 487 | WINPNSGGTNYAQKFQG | 492 | DMNILATVPFDI | 497 |
| CAR123-3 | GYYIH | 488 | WINPNSGGTNYAQKFQG | 493 | DMNILATVPFDI | 498 |
| CAR123-4 | DYYMH | 489 | WINPNSGDTNYAQKFQG | 494 | DMNILATVPFDI | 499 |
| CAR123-1 | GYYMH | 486 | WINPNSGGTNYAQKFQG | 491 | DMNILATVPFDI | 496 |
| hzCAR123-1 | SYWMN | 490 | RIDPYDSETHYNQKFKD | 495 | GNWDDY | 500 |
| hzCAR123-2 | SYWMN | 490 | RIDPYDSETHYNQKFKD | 495 | GNWDDY | 500 |
| hzCAR123-3 | SYWMN | 490 | RIDPYDSETHYNQKFKD | 495 | GNWDDY | 500 |
| hzCAR123-4 | SYWMN | 490 | RIDPYDSETHYNQKFKD | 495 | GNWDDY | 500 |
| hzCAR123-5 | SYWMN | 490 | RIDPYDSETHYNQKFKD | 495 | GNWDDY | 500 |
| hzCAR123-6 | SYWMN | 490 | RIDPYDSETHYNQKFKD | 495 | GNWDDY | 500 |
| hzCAR123-7 | SYWMN | 490 | RIDPYDSETHYNQKFKD | 495 | GNWDDY | 500 |
| hzCAR123-8 | SYWMN | 490 | RIDPYDSETHYNQKFKD | 495 | GNWDDY | 500 |
| hzCAR123-9 | SYWMN | 490 | RIDPYDSETHYNQKFKD | 495 | GNWDDY | 500 |
| hzCAR123-10 | SYWMN | 490 | RIDPYDSETHYNQKFKD | 495 | GNWDDY | 500 |
| hzCAR123-11 | SYWMN | 490 | RIDPYDSETHYNQKFKD | 495 | GNWDDY | 500 |
| hzCAR123-12 | SYWMN | 490 | RIDPYDSETHYNQKFKD | 495 | GNWDDY | 500 |
| hzCAR123-13 | SYWMN | 490 | RIDPYDSETHYNQKFKD | 495 | GNWDDY | 500 |
| hzCAR123-14 | SYWMN | 490 | RIDPYDSETHYNQKFKD | 495 | GNWDDY | 500 |
| hzCAR123-15 | SYWMN | 490 | RIDPYDSETHYNQKFKD | 495 | GNWDDY | 500 |
| hzCAR123-16 | SYWMN | 490 | RIDPYDSETHYNQKFKD | 495 | GNWDDY | 500 |
| hzCAR123-17 | SYWMN | 490 | RIDPYDSETHYNQKFKD | 495 | GNWDDY | 500 |
| hzCAR123-18 | SYWMN | 490 | RIDPYDSETHYNQKFKD | 495 | GNWDDY | 500 |
| hzCAR123-19 | SYWMN | 490 | RIDPYDSETHYNQKFKD | 495 | GNWDDY | 500 |
| hzCAR123-20 | SYWMN | 490 | RIDPYDSETHYNQKFKD | 495 | GNWDDY | 500 |
| hzCAR123-21 | SYWMN | 490 | RIDPYDSETHYNQKFKD | 495 | GNWDDY | 500 |
| hzCAR123-22 | SYWMN | 490 | RIDPYDSETHYNQKFKD | 495 | GNWDDY | 500 |
| hzCAR123-23 | SYWMN | 490 | RIDPYDSETHYNQKFKD | 495 | GNWDDY | 500 |
| hzCAR123-24 | SYWMN | 490 | RIDPYDSETHYNQKFKD | 495 | GNWDDY | 500 |
| hzCAR123-25 | SYWMN | 490 | RIDPYDSETHYNQKFKD | 495 | GNWDDY | 500 |
| hzCAR123-26 | SYWMN | 490 | RIDPYDSETHYNQKFKD | 495 | GNWDDY | 500 |
| hzCAR123-27 | SYWMN | 490 | RIDPYDSETHYNQKFKD | 495 | GNWDDY | 500 |
| hzCAR123-28 | SYWMN | 490 | RIDPYDSETHYNQKFKD | 495 | GNWDDY | 500 |
| hzCAR123-29 | SYWMN | 490 | RIDPYDSETHYNQKFKD | 495 | GNWDDY | 500 |
| hzCAR123-30 | SYWMN | 490 | RIDPYDSETHYNQKFKD | 495 | GNWDDY | 500 |
| hzCAR123-31 | SYWMN | 490 | RIDPYDSETHYNQKFKD | 495 | GNWDDY | 500 |
| hzCAR123-32 | SYWMN | 490 | RIDPYDSETHYNQKFKD | 495 | GNWDDY | 500 |

TABLE 6A
Light Chain Variable Domain CDRs according to
the Kabat numbering scheme (Kabat et al.
(1991), “Sequences of Proteins of
Immunological Interest,” 5th Ed.
Public Health Service, National Institutes of
Health, Bethesda, MD)

| Candidate | LCDR1 | ID | LCDR2 | ID | LCDR3 | ID |
|---|---|---|---|---|---|---|
| CAR123-2 | RASQSISSYLN | 502 | AASSLQS | 507 | QQGDSVPLT | 512 |
| CAR123-3 | RASQSISSYLN | 503 | AASSLQS | 508 | QQGDSVPLT | 513 |
| CAR123-4 | RASQSISSYLN | 504 | AASSLQS | 509 | QQGDSVPLT | 514 |
| CAR123-1 | RASQSISTYLN | 501 | AAFSLQS | 506 | QQGDSVPLT | 511 |
| hzCAR123-1 | RASKSISKDLA | 505 | SGSTLQS | 510 | QQHNKYPYT | 515 |
| hzCAR123-2 | RASKSISKDLA | 505 | SGSTLQS | 510 | QQHNKYPYT | 515 |
| hzCAR123-3 | RASKSISKDLA | 505 | SGSTLQS | 510 | QQHNKYPYT | 515 |
| hzCAR123-4 | RASKSISKDLA | 505 | SGSTLQS | 510 | QQHNKYPYT | 515 |
| hzCAR123-5 | RASKSISKDLA | 505 | SGSTLQS | 510 | QQHNKYPYT | 515 |
| hzCAR123-6 | RASKSISKDLA | 505 | SGSTLQS | 510 | QQHNKYPYT | 515 |
| hzCAR123-7 | RASKSISKDLA | 505 | SGSTLQS | 510 | QQHNKYPYT | 515 |
| hzCAR123-8 | RASKSISKDLA | 505 | SGSTLQS | 510 | QQHNKYPYT | 515 |
| hzCAR123-10 | RASKSISKDLA | 505 | SGSTLQS | 510 | QQHNKYPYT | 515 |
| hzCAR123-10 | RASKSISKDLA | 505 | SGSTLQS | 510 | QQHNKYPYT | 515 |
| hzCAR123-11 | RASKSISKDLA | 505 | SGSTLQS | 510 | QQHNKYPYT | 515 |
| hzCAR123-12 | RASKSISKDLA | 505 | SGSTLQS | 510 | QQHNKYPYT | 515 |
| hzCAR123-13 | RASKSISKDLA | 505 | SGSTLQS | 510 | QQHNKYPYT | 515 |
| hzCAR123-14 | RASKSISKDLA | 505 | SGSTLQS | 510 | QQHNKYPYT | 515 |
| hzCAR123-15 | RASKSISKDLA | 505 | SGSTLQS | 510 | QQHNKYPYT | 515 |
| hzCAR123-16 | RASKSISKDLA | 505 | SGSTLQS | 510 | QQHNKYPYT | 515 |
| hzCAR123-17 | RASKSISKDLA | 505 | SGSTLQS | 510 | QQHNKYPYT | 515 |
| hzCAR123-18 | RASKSISKDLA | 505 | SGSTLQS | 510 | QQHNKYPYT | 515 |
| hzCAR123-19 | RASKSISKDLA | 505 | SGSTLQS | 510 | QQHNKYPYT | 515 |
| hzCAR123-20 | RASKSISKDLA | 505 | SGSTLQS | 510 | QQHNKYPYT | 515 |
| hzCAR123-21 | RASKSISKDLA | 505 | SGSTLQS | 510 | QQHNKYPYT | 515 |
| hzCAR123-22 | RASKSISKDLA | 505 | SGSTLQS | 510 | QQHNKYPYT | 515 |
| hzCAR123-23 | RASKSISKDLA | 505 | SGSTLQS | 510 | QQHNKYPYT | 515 |
| hzCAR123-24 | RASKSISKDLA | 505 | SGSTLQS | 510 | QQHNKYPYT | 515 |
| hzCAR123-25 | RASKSISKDLA | 505 | SGSTLQS | 510 | QQHNKYPYT | 515 |
| hzCAR123-26 | RASKSISKDLA | 505 | SGSTLQS | 510 | QQHNKYPYT | 515 |
| hzCAR123-27 | RASKSISKDLA | 505 | SGSTLQS | 510 | QQHNKYPYT | 515 |
| hzCAR123-28 | RASKSISKDLA | 505 | SGSTLQS | 510 | QQHNKYPYT | 515 |
| hzCAR123-29 | RASKSISKDLA | 505 | SGSTLQS | 510 | QQHNKYPYT | 515 |
| hzCAR123-30 | RASKSISKDLA | 505 | SGSTLQS | 510 | QQHNKYPYT | 515 |
| hzCAR123-31 | RASKSISKDLA | 505 | SGSTLQS | 510 | QQHNKYPYT | 515 |
| hzCAR123-32 | RASKSISKDLA | 505 | SGSTLQS | 510 | QQHNKYPYT | 515 |

TABLE 7A
Heavy Chain Variable Domain CDRs
according to the Chothia numbering scheme
(Al-Lazikani et al., (1997) JMB 273, 927-948)

| Candidate | HCDR1 | ID | HCDR2 | ID | HCDR3 | ID |
|---|---|---|---|---|---|---|
| CAR123-2 | GYTFTGY | 517 | NPNSGG | 522 | DMNILATVPFDI | 527 |
| CAR123-3 | GYIFTGY | 518 | NPNSGG | 523 | DMNILATVPFDI | 528 |
| CAR123-4 | GYTFTDY | 519 | NPNSGD | 524 | DMNILATVPFDI | 529 |
| CAR123-1 | GYTFTGY | 516 | NPNSGG | 521 | DMNILATVPFDI | 526 |
| hzCAR123-1 | GYTFTSY | 520 | DPYDSE | 525 | GNWDDY | 530 |
| hzCAR123-2 | GYTFTSY | 520 | DPYDSE | 525 | GNWDDY | 530 |
| hzCAR123-3 | GYTFTSY | 520 | DPYDSE | 525 | GNWDDY | 530 |
| hzCAR123-4 | GYTFTSY | 520 | DPYDSE | 525 | GNWDDY | 530 |
| hzCAR123-5 | GYTFTSY | 520 | DPYDSE | 525 | GNWDDY | 530 |
| hzCAR123-6 | GYTFTSY | 520 | DPYDSE | 525 | GNWDDY | 530 |
| hzCAR123-7 | GYTFTSY | 520 | DPYDSE | 525 | GNWDDY | 530 |
| hzCAR123-8 | GYTFTSY | 520 | DPYDSE | 525 | GNWDDY | 530 |
| hzCAR123-9 | GYTFTSY | 520 | DPYDSE | 525 | GNWDDY | 530 |
| hzCAR123-10 | GYTFTSY | 520 | DPYDSE | 525 | GNWDDY | 530 |
| hzCAR123-11 | GYTFTSY | 520 | DPYDSE | 525 | GNWDDY | 530 |
| hzCAR123-12 | GYTFTSY | 520 | DPYDSE | 525 | GNWDDY | 530 |
| hzCAR123-13 | GYTFTSY | 520 | DPYDSE | 525 | GNWDDY | 530 |
| hzCAR123-14 | GYTFTSY | 520 | DPYDSE | 525 | GNWDDY | 530 |
| hzCAR123-15 | GYTFTSY | 520 | DPYDSE | 525 | GNWDDY | 530 |
| hzCAR123-16 | GYTFTSY | 520 | DPYDSE | 525 | GNWDDY | 530 |
| hzCAR123-17 | GYTFTSY | 520 | DPYDSE | 525 | GNWDDY | 530 |
| hzCAR123-18 | GYTFTSY | 520 | DPYDSE | 525 | GNWDDY | 530 |
| hzCAR123-19 | GYTFTSY | 520 | DPYDSE | 525 | GNWDDY | 530 |
| hzCAR123-20 | GYTFTSY | 520 | DPYDSE | 525 | GNWDDY | 530 |
| hzCAR123-21 | GYTFTSY | 520 | DPYDSE | 525 | GNWDDY | 530 |
| hzCAR123-22 | GYTFTSY | 520 | DPYDSE | 525 | GNWDDY | 530 |
| hzCAR123-23 | GYTFTSY | 520 | DPYDSE | 525 | GNWDDY | 530 |
| hzCAR123-24 | GYTFTSY | 520 | DPYDSE | 525 | GNWDDY | 530 |
| hzCAR123-25 | GYTFTSY | 520 | DPYDSE | 525 | GNWDDY | 530 |
| hzCAR123-26 | GYTFTSY | 520 | DPYDSE | 525 | GNWDDY | 530 |
| hzCAR123-27 | GYTFTSY | 520 | DPYDSE | 525 | GNWDDY | 530 |
| hzCAR123-28 | GYTFTSY | 520 | DPYDSE | 525 | GNWDDY | 530 |
| hzCAR123-29 | GYTFTSY | 520 | DPYDSE | 525 | GNWDDY | 530 |
| hzCAR123-30 | GYTFTSY | 520 | DPYDSE | 525 | GNWDDY | 530 |
| hzCAR123-31 | GYTFTSY | 520 | DPYDSE | 525 | GNWDDY | 530 |
| hzCAR123-32 | GYTFTSY | 520 | DPYDSE | 525 | GNWDDY | 530 |

TABLE 8A
Light Chain Variable Domain CDRs according
to the Chothia numbering scheme (Al-Lazikani
et al., (1997) JMB 273, 927-948)

| Candidate | LCDR1 | ID | LCDR2 | ID | LCDR3 | ID |
|---|---|---|---|---|---|---|
| CAR123-2 | SQSISSY | 532 | AAS | 537 | GDSVPL | 542 |
| CAR123-3 | SQSISSY | 533 | AAS | 538 | GDSVPL | 543 |
| CAR123-4 | SQSISSY | 534 | AAS | 539 | GDSVPL | 544 |
| CAR123-1 | SQSISTY | 531 | AAF | 536 | GDSVPL | 541 |
| hzCAR123-1 | SKSISKD | 535 | SGS | 540 | HNKYPY | 555 |
| hzCAR123-2 | SKSISKD | 535 | SGS | 540 | HNKYPY | 555 |
| hzCAR123-3 | SKSISKD | 535 | SGS | 540 | HNKYPY | 555 |
| hzCAR123-4 | SKSISKD | 535 | SGS | 540 | HNKYPY | 555 |
| hzCAR123-5 | SKSISKD | 535 | SGS | 540 | HNKYPY | 555 |
| hzCAR123-6 | SKSISKD | 535 | SGS | 540 | HNKYPY | 555 |
| hzCAR123-7 | SKSISKD | 535 | SGS | 540 | HNKYPY | 555 |
| hzCAR123-8 | SKSISKD | 535 | SGS | 540 | HNKYPY | 555 |
| hzCAR123-10 | SKSISKD | 535 | SGS | 540 | HNKYPY | 555 |
| hzCAR123-10 | SKSISKD | 535 | SGS | 540 | HNKYPY | 555 |
| hzCAR123-11 | SKSISKD | 535 | SGS | 540 | HNKYPY | 555 |
| hzCAR123-12 | SKSISKD | 535 | SGS | 540 | HNKYPY | 555 |
| hzCAR123-13 | SKSISKD | 535 | SGS | 540 | HNKYPY | 555 |
| hzCAR123-14 | SKSISKD | 535 | SGS | 540 | HNKYPY | 555 |
| hzCAR123-15 | SKSISKD | 535 | SGS | 540 | HNKYPY | 555 |
| hzCAR123-16 | SKSISKD | 535 | SGS | 540 | HNKYPY | 555 |
| hzCAR123-17 | SKSISKD | 535 | SGS | 540 | HNKYPY | 555 |
| hzCAR123-18 | SKSISKD | 535 | SGS | 540 | HNKYPY | 555 |
| hzCAR123-19 | SKSISKD | 535 | SGS | 540 | HNKYPY | 555 |
| hzCAR123-20 | SKSISKD | 535 | SGS | 540 | HNKYPY | 555 |
| hzCAR123-21 | SKSISKD | 535 | SGS | 540 | HNKYPY | 555 |
| hzCAR123-22 | SKSISKD | 535 | SGS | 540 | HNKYPY | 555 |
| hzCAR123-23 | SKSISKD | 535 | SGS | 540 | HNKYPY | 555 |
| hzCAR123-24 | SKSISKD | 535 | SGS | 540 | HNKYPY | 555 |
| hzCAR123-25 | SKSISKD | 535 | SGS | 540 | HNKYPY | 555 |
| hzCAR123-26 | SKSISKD | 535 | SGS | 540 | HNKYPY | 555 |
| hzCAR123-27 | SKSISKD | 535 | SGS | 540 | HNKYPY | 555 |
| hzCAR123-28 | SKSISKD | 535 | SGS | 540 | HNKYPY | 555 |
| hzCAR123-29 | SKSISKD | 535 | SGS | 540 | HNKYPY | 555 |
| hzCAR123-30 | SKSISKD | 535 | SGS | 540 | HNKYPY | 555 |
| hzCAR123-31 | SKSISKD | 535 | SGS | 540 | HNKYPY | 555 |
| hzCAR123-32 | SKSISKD | 535 | SGS | 540 | HNKYPY | 555 |

[0420] In embodiments, CD123 single chain variable fragments are generated and cloned into lentiviral CAR expression vectors with the intracellular CD3zeta domain and the intracellular co-stimulatory domain of 4-1BB. Names of exemplary fully human CD123 scFvs are depicted in Table 9A. Names of exemplary humanized CD123 scFvs are depicted in Table 10A.

TABLE 9A
CAR-CD123 constructs

| Construct ID | CAR Nickname |
|---|---|
| EBB-C1357-F11 | CAR123-1 |
| EBB-C1358-B10 | CAR123-2 |
| EBB-C1358-D5 | CAR123-3 |
| EBB-C1357-C4 | CAR123-4 |

TABLE 10A
CAR-CD123 constructs

| Construct ID | CAR Nickname |
|---|---|
| VH1_1-46_X_VK1_L8 | hzCAR-1 |
| VH1_1-46_X_VK3_L6 | hzCAR-2 |
| VH1_1-46_X_VK6_A14 | hzCAR-3 |
| VH1_1-46_X_VK4_B3 | hzCAR-4 |
| VK1_L8_X_VH1_1-46 | hzCAR-5 |
| VK3_L6_X_VH1_1-46 | hzCAR-6 |
| VK6_A14_X_VH1_1-46 | hzCAR-7 |
| VK4_B3_X_VH1_1-46 | hzCAR-8 |
| VH7_7-4.1_X_VK1_L8 | hzCAR-9 |
| VH7_7-4.1_X_VK3_L6 | hzCAR-10 |
| VH7_7-4.1_X_VK6_A14 | hzCAR-11 |
| VH7_7-4.1_X_VK4_B3 | hzCAR-12 |
| VK1_L8_X_VH7_7-4.1 | hzCAR-13 |
| VK3_L6_X_VH7_7-4.1 | hzCAR-14 |
| VK6_A14_X_VH7_7-4.1 | hzCAR-15 |
| VK4_B3_X_VH7_7-4.1 | hzCAR-16 |
| VH5_5-A_X_VK1_L8 | hzCAR-17 |
| VH5_5-A_X_VK3_L6 | hzCAR-18 |
| VH5_5-A_X_VK6_A14 | hzCAR-19 |
| VH5_5-A_X_VK4_B3 | hzCAR-20 |
| VK1_L8_X_VH5_5-A | hzCAR-21 |
| VK3_L6_X_VH5_5-A | hzCAR-22 |
| VK6_A14_X_VH5_5-A | hzCAR-23 |
| VK4_B3_X_VH5_5-A | hzCAR-24 |
| VH3_3-74_X_VK1_L8 | hzCAR-25 |
| VH3_3-74_X_VK3_L6 | hzCAR-26 |
| VH3_3-74_X_VK6_A14 | hzCAR-27 |
| VH3_3-74_X_VK4_B3 | hzCAR-28 |
| VK1_L8_X_VH3_3-74 | hzCAR-29 |
| VK3_L6_X_VH3_3-74 | hzCAR-30 |
| VK6_A14_X_VH3_3-74 | hzCAR-31 |
| VK4_B3_X_VH3_3-74 | hzCAR-32 |

[0421] In embodiments, the order in which the VL and VH domains appear in the scFv is varied (i.e., VL-VH, or VH-VL orientation), and where either three or four copies of the “G4S” (SEQ ID NO:25) subunit, in which each subunit comprises the sequence GGGGS (SEQ ID NO:25) (e.g., (G4S)₃ (SEQ ID NO:28) or (G4S)₄(SEQ ID NO:27)), connect the variable domains to create the entirety of the scFv domain, as shown in Table 11A, Table 12A, and Table 12B.

[0422] The amino acid and nucleic acid sequences of the CD123 scFv domains and CD123 CAR molecules are provided in Table 11A, Table 12A, and Table 12B. The amino acid sequences for the variable heavy chain and variable light chain for each scFv is also provided in Table 11A and Table 12A. It is noted that the scFv fragments (SEQ ID NOs: 157-160, and 184-215) with a leader sequence (e.g., the amino acid sequence of SEQ ID NO: 1 or the nucleotide sequence of SEQ ID NO: 12) and without a leader sequence (SEQ ID NOs: 478, 480, 483, 485, and 556-587) are also encompassed by the present invention.

[0423] In embodiments, these clones in Table 11A and 12A all contained a Q/K residue change in the signal domain of the co-stimulatory domain derived from CD3zeta chain.

TABLE 11A
Exemplary CD123 CAR sequences

| | SEQ | |
|---|---|---|
| Name | ID | Sequence |
| CAR123-2 | 40 | atggccctccctgtcaccgccctgctgcttccgctggctcttctgctccacgccgctcggccccaag |
| NT | | tgcaactcgtccaaagcggagcggaagtcaagaaacccggagcgagcgtgaaagtgtcctgcaa |
| | | agcctccggctacacctttacgggctactacatgcactgggtgcgccaggcaccaggacagggtc |
| | | ttgaatggatgggatggatcaaccctaattcgggcggaactaactacgcacagaagttccagggga |
| | | gagtgactctgactcgggatacctccatctcaactgtctacatggaactctcccgcttgcggtcagat |
| | | gatacggcagtgtactactgcgcccgcgacatgaatatcctggctaccgtgccgttcgacatctggg |
| | | gacaggggactatggttactgtctcatcgggcggtggaggttcaggaggaggcggctcgggagg |
| | | cggaggttcggacattcagatgacccagtccccatcctctctgtcggccagcgtcggagatagggt |
| | | gaccattacctgtcgggcctcgcaaagcatctcctcgtacctcaactggtatcagcaaaagccggg |
| | | aaaggcgcctaagctgctgatctacgccgcttcgagcttgcaaagcggggtgccatccagattctc |
| | | gggatcaggctcaggaaccgacttcaccctgaccgtgaacagcctccagccggaggactttgcca |
| | | cttactactgccagcagggagactccgtgccgcttactttcggggggggtacccgcctggagatca |
| | | agaccactaccccagcaccgaggccacccaccccggctcctaccatcgcctcccagcctctgtcc |
| | | ctgcgtccggaggcatgtagacccgcagctggtggggccgtgcatacccggggtcttgacttcgc |
| | | ctgcgatatctacatttgggcccctctggctggtacttgcggggtcctgctgctttcactcgtgatcact |
| | | ctttactgtaagcgcggtcggaagaagctgctgtacatctttaagcaacccttcatgaggcctgtgca |
| | | gactactcaagaggaggacggctgttcatgccggttcccagaggaggaggaaggcggctgcgaa |
| | | ctgcgcgtgaaattcagccgcagcgcagatgctccagcctacaagcaggggcagaaccagctct |
| | | acaacgaactcaatcttggtcggagagaggagtacgacgtgctggacaagcggagaggacggg |
| | | acccagaaatgggcgggaagccgcgcagaaagaatccccaagagggcctgtacaacgagctcc |
| | | aaaaggataagatggcagaagcctatagcgagattggtatgaaaggggaacgcagaagaggcaa |
| | | aggccacgacggactgtaccagggactcagcaccgccaccaaggacacctatgacgctcttcac |
| | | atgcaggccctgccgcctcgg |
| CAR123-2 | 99 | MALPVTALLLPLALLLHAARPQVQLVQSGAEVKKPGASVKVS |
| AA | | CKASGYTFTGYYMHWVRQAPGQGLEWMGWINPNSGGTNYA |
| | | QKFQGRVTLTRDTSISTVYMELSRLRSDDTAVYYCARDMNILA |
| | | TVPFDIWGQGTMVTVSSGGGGSGGGGSGGGGSDIQMTQSPSS |
| | | LSASVGDRVTITCRASQSISSYLNWYQQKPGKAPKLLIYAASSL |
| | | QSGVPSRFSGSGSGTDFTLTVNSLQPEDFATYYCQQGDSVPLTF |
| | | GGGTRLEIKTTTPAPRPPTPAPTIASQPLSLRPEACRPAAGGAV |
| | | HTRGLDFACDIYIWAPLAGTCGVLLLSLVITLYCKRGRKKLLYI |
| | | FKQPFMRPVQTTQEEDGCSCRFPEEEEGGCELRVKFSRSADAP |
| | | AYKQGQNQLYNELNLGRREEYDVLDKRRGRDPEMGGKPRRK |
| | | NPQEGLYNELQKDKMAEAYSEIGMKGERRRGKGHDGLYQGL |
| | | STATKDTYDALHMQALPPR |
| CAR123-2 | 158 | MALPVTALLLPLALLLHAARPQVQLVQSGAEVKKPGASVKVS |
| scFv | | CKASGYTFTGYYMHWVRQAPGQGLEWMGWINPNSGGTNYA |
| | | QKFQGRVTLTRDTSISTVYMELSRLRSDDTAVYYCARDMNILA |
| | | TVPFDIWGQGTMVTVSSGGGGSGGGGSGGGGSDIQMTQSPSS |
| | | LSASVGDRVTITCRASQSISSYLNWYQQKPGKAPKLLIYAASSL |
| | | QSGVPSRFSGSGSGTDFTLTVNSLQPEDFATYYCQQGDSVPLTF |
| | | GGGTRLEIK |
| CAR123-2 | 217 | QVQLVQSGAEVKKPGASVKVSCKASGYTFTGYYMHWVRQAP |
| VH | | GQGLEWMGWINPNSGGTNYAQKFQGRVTLTRDTSISTVYMEL |
| | | SRLRSDDTAVYYCARDMNILATVPFDIWGQGTMVTVSS |
| CAR123-2 | 276 | DIQMTQSPSSLSASVGDRVTITCRASQSISSYLNWYQQKPGKAP |
| VL | | KLLIYAASSLQSGVPSRFSGSGSGTDFTLTVNSLQPEDFATYYC |
| | | QQGDSVPLTFGGGTRLEIK |
| CAR123-3 | 41 | atggccctccctgtcaccgccctgctgcttccgctggctcttctgctccacgccgctcggccccaag |
| NT | | tccaactcgttcaatccggcgcagaagtcaagaagccaggagcatcagtgaaagtgtcctgcaaa |
| | | gcctcaggctacatcttcacgggatactacatccactgggtgcgccaggctccgggccagggcctt |
| | | gagtggatgggctggatcaaccctaactctgggggaaccaactacgctcagaagttccaggggag |
| | | ggtcactatgactcgcgatacctccatctccactgcgtacatggaactctcgggactgagatccgac |
| | | gatcctgccgtgtactactgcgcccgggacatgaacatcttggcgaccgtgccgtttgacatttggg |
| | | gacagggcaccctcgtcactgtgtcgagcggtggaggaggctcggggggtggcggatcaggag |
| | | ggggaggaagcgacatccagctgactcagagcccatcgtcgttgtccgcgtcggtgggggatag |
| | | agtgaccattacttgccgcgccagccagagcatctcatcatatctgaattggtaccagcagaagccc |
| | | ggaaaggccccaaaactgctgatctacgctgcaagcagcctccaatcgggagtgccgtcacggtt |
| | | ctccgggtccggttcgggaactgactttaccctgaccgtgaattcgctgcaaccggaggatttcgcc |
| | | acgtactactgtcagcaaggagactccgtgccgctgaccttcggtggaggcaccaaggtcgaaat |
| | | caagaccactaccccagcaccgaggccacccaccccggctcctaccatcgcctcccagcctctgt |
| | | ccctgcgtccggaggcatgtagacccgcagctggtggggccgtgcatacccggggtcttgacttc |
| | | gcctgcgatatctacatttgggcccctctggctggtacttgcggggtcctgctgctttcactcgtgatc |
| | | actctttactgtaagcgcggtcggaagaagctgctgtacatctttaagcaacccttcatgaggcctgt |
| | | gcagactactcaagaggaggacggctgttcatgccggttcccagaggaggaggaaggcggctgc |
| | | gaactgcgcgtgaaattcagccgcagcgcagatgctccagcctacaagcaggggcagaaccagc |
| | | tctacaacgaactcaatcttggtcggagagaggagtacgacgtgctggacaagcggagaggacg |
| | | ggacccagaaatgggcgggaagccgcgcagaaagaatccccaagagggcctgtacaacgagct |
| | | ccaaaaggataagatggcagaagcctatagcgagattggtatgaaaggggaacgcagaagaggc |
| | | aaaggccacgacggactgtaccagggactcagcaccgccaccaaggacacctatgacgctcttc |
| | | acatgcaggccctgccgcctcgg |
| CAR123-3 | 100 | MALPVTALLLPLALLLHAARPQVQLVQSGAEVKKPGASVKVS |
| AA | | CKASGYIFTGYYIHWVRQAPGQGLEWMGWINPNSGGTNYAQ |
| | | KFQGRVTMTRDTSISTAYMELSGLRSDDPAVYYCARDMNILA |
| | | TVPFDIWGQGTLVTVSSGGGGSGGGGSGGGGSDIQLTQSPSSL |
| | | SASVGDRVTITCRASQSISSYLNWYQQKPGKAPKLLIYAASSLQ |
| | | SGVPSRFSGSGSGTDFTLTVNSLQPEDFATYYCQQGDSVPLTFG |
| | | GGTKVEIKTTTPAPRPPTPAPTIASQPLSLRPEACRPAAGGAVH |
| | | TRGLDFACDIYIWAPLAGTCGVLLLSLVITLYCKRGRKKLLYIF |
| | | KQPFMRPVQTTQEEDGCSCRFPEEEEGGCELRVKFSRSADAPA |
| | | YKQGQNQLYNELNLGRREEYDVLDKRRGRDPEMGGKPRRKN |
| | | PQEGLYNELQKDKMAEAYSEIGMKGERRRGKGHDGLYQGLS |
| | | TATKDTYDALHMQALPPR |
| CAR123-3 | 159 | MALPVTALLLPLALLLHAARPQVQLVQSGAEVKKPGASVKVS |
| scFv | | CKASGYIFTGYYIHWVRQAPGQGLEWMGWINPNSGGTNYAQ |
| | | KFQGRVTMTRDTSISTAYMELSGLRSDDPAVYYCARDMNILA |
| | | TVPFDIWGQGTLVTVSSGGGGSGGGGSGGGGSDIQLTQSPSSL |
| | | SASVGDRVTITCRASQSISSYLNWYQQKPGKAPKLLIYAASSLQ |
| | | SGVPSRFSGSGSGTDFTLTVNSLQPEDFATYYCQQGDSVPLTFG |
| | | GGTKVEIK |
| CAR123-3 | 218 | QVQLVQSGAEVKKPGASVKVSCKASGYIFTGYYIHWVRQAPG |
| VH | | QGLEWMGWINPNSGGTNYAQKFQGRVTMTRDTSISTAYMEL |
| | | SGLRSDDPAVYYCARDMNILATVPFDIWGQGTLVTVSS |
| CAR123-3 | 277 | DIQLTQSPSSLSASVGDRVTITCRASQSISSYLNWYQQKPGKAP |
| VL | | KLLIYAASSLQSGVPSRFSGSGSGTDFTLTVNSLQPEDFATYYC |
| | | QQGDSVPLTFGGGTKVEIK |
| CAR123-4 | 42 | atggccctccctgtcaccgccctgctgcttccgctggctcttctgctccacgccgctcggccccaag |
| NT | | tccaactccaacagtcaggcgcagaagtgaaaaagagcggtgcatcggtgaaagtgtcatgcaaa |
| | | gcctcgggctacaccttcactgactactatatgcactggctgcggcaggcaccgggacagggactt |
| | | gagtggatgggatggatcaacccgaattcaggggacactaactacgcgcagaagttccagggga |
| | | gagtgaccctgacgagggacacctcaatttcgaccgtctacatggaattgtcgcgcctgagatcgg |
| | | acgatactgctgtgtactactgtgcccgcgacatgaacatcctcgcgactgtgccttttgatatctggg |
| | | gacaggggactatggtcaccgtttcctccgcttccggtggcggaggctcgggaggccgggcctcc |
| | | ggtggaggaggcagcgacatccagatgactcagagcccttcctcgctgagcgcctcagtgggag |
| | | atcgcgtgaccatcacttgccgggccagccagtccatttcgtcctacctcaattggtaccagcagaa |
| | | gccgggaaaggcgcccaagctcttgatctacgctgcgagctccctgcaaagcggggtgccgagc |
| | | cgattctcgggttccggctcgggaaccgacttcactctgaccatctcatccctgcaaccagaggact |
| | | ttgccacctactactgccaacaaggagattctgtcccactgacgttcggcggaggaaccaaggtcg |
| | | aaatcaagaccactaccccagcaccgaggccacccaccccggctcctaccatcgcctcccagcct |
| | | ctgtccctgcgtccggaggcatgtagacccgcagctggtggggccgtgcatacccggggtcttga |
| | | cttcgcctgcgatatctacatttgggcccctctggctggtacttgcggggtcctgctgctttcactcgtg |
| | | atcactctttactgtaagcgcggtcggaagaagctgctgtacatctttaagcaacccttcatgaggcct |
| | | gtgcagactactcaagaggaggacggctgttcatgccggttcccagaggaggaggaaggcggct |
| | | gcgaactgcgcgtgaaattcagccgcagcgcagatgctccagcctacaagcaggggcagaacca |
| | | gctctacaacgaactcaatcttggtcggagagaggagtacgacgtgctggacaagcggagagga |
| | | cgggacccagaaatgggcgggaagccgcgcagaaagaatccccaagagggcctgtacaacga |
| | | gctccaaaaggataagatggcagaagcctatagcgagattggtatgaaaggggaacgcagaaga |
| | | ggcaaaggccacgacggactgtaccagggactcagcaccgccaccaaggacacctatgacgct |
| | | cttcacatgcaggccctgccgcctcgg |
| CAR123-4 | 101 | MALPVTALLLPLALLLHAARPQVQLQQSGAEVKKSGASVKVS |
| AA | | CKASGYTFTDYYMHWLRQAPGQGLEWMGWINPNSGDTNYA |
| | | QKFQGRVTLTRDTSISTVYMELSRLRSDDTAVYYCARDMNILA |
| | | TVPFDIWGQGTMVTVSSASGGGGSGGRASGGGGSDIQMTQSP |
| | | SSLSASVGDRVTITCRASQSISSYLNWYQQKPGKAPKLLIYAAS |
| | | SLQSGVPSRFSGSGSGTDFTLTISSLQPEDFATYYCQQGDSVPL |
| | | TFGGGTKVEIKTTTPAPRPPTPAPTIASQPLSLRPEACRPAAGGA |
| | | VHTRGLDFACDIYIWAPLAGTCGVLLLSLVITLYCK |
| CAR123-4 | 160 | MALPVTALLLPLALLLHAARPQVQLQQSGAEVKKSGASVKVS |
| scFv | | CKASGYTFTDYYMHWLRQAPGQGLEWMGWINPNSGDTNYA |
| | | QKFQGRVTLTRDTSISTVYMELSRLRSDDTAVYYCARDMNILA |
| | | TVPFDIWGQGTMVTVSSASGGGGSGGRASGGGGSDIQMTQSP |
| | | SSLSASVGDRVTITCRASQSISSYLNWYQQKPGKAPKLLIYAAS |
| | | SLQSGVPSRFSGSGSGTDFTLTISSLQPEDFATYYCQQGDSVPL |
| | | TFGGGTKVEIK |
| CAR123-4 | 219 | QVQLQQSGAEVKKSGASVKVSCKASGYTFTDYYMHWLRQAP |
| VH | | GQGLEWMGWINPNSGDTNYAQKFQGRVTLTRDTSISTVYMEL |
| | | SRLRSDDTAVYYCARDMNILATVPFDIWGQGTMVTVSS |
| CAR123-4 | 278 | DIQMTQSPSSLSASVGDRVTITCRASQSISSYLNWYQQKPGKAP |
| VL | | KLLIYAASSLQSGVPSRFSGSGSGTDFTLTISSLQPEDFATYYCQ |
| | | QGDSVPLTFGGGTKVEIK |
| CAR123-1 | 39 | atggccctccctgtcaccgccctgctgcttccgctggctcttctgctccacgccgctcggccccaag |
| NT | | tccaactcgtccagtcaggagcggaagtcaagaagcccggagcgtcagtcaaagtgtcatgcaaa |
| | | gcctcgggctacactttcactgggtactacatgcactgggtgcgccaggctccaggacagggactg |
| | | gaatggatgggatggatcaacccgaactccggtggcaccaattacgcccagaagttccagggga |
| | | gggtgaccatgactcgcgacacgtcgatcagcaccgcatacatggagctgtcaagactccggtcc |
| | | gacgatactgccgtgtactactgcgcacgggacatgaacattctggccaccgtgccttttgacatctg |
| | | gggtcagggaactatggttaccgtgtcctctggtggaggcggctccggcggggggggaagcgga |
| | | ggcggtggaagcgacattcagatgacccagtcgccttcatccctttcggcgagcgtgggagatcg |
| | | cgtcactatcacttgtcgggcctcgcagtccatctccacctacctcaattggtaccagcagaagcca |
| | | ggaaaagcaccgaatctgctgatctacgccgcgttttccttgcaatcgggagtgccaagcagattca |
| | | gcggatcgggatcaggcactgatttcaccctcaccatcaactcgctgcaaccggaggatttcgctac |
| | | gtactattgccaacaaggagacagcgtgccgctcaccttcggcggagggactaagctggaaatca |
| | | agaccactaccccagcaccgaggccacccaccccggctcctaccatcgcctcccagcctctgtcc |
| | | ctgcgtccggaggcatgtagacccgcagctggtggggccgtgcatacccggggtcttgacttcgc |
| | | ctgcgatatctacatttgggcccctctggctggtacttgcggggtcctgctgctttcactcgtgatcact |
| | | ctttactgtaagcgcggtcggaagaagctgctgtacatctttaagcaacccttcatgaggcctgtgca |
| | | gactactcaagaggaggacggctgttcatgccggttcccagaggaggaggaaggcggctgcgaa |
| | | ctgcgcgtgaaattcagccgcagcgcagatgctccagcctacaagcaggggcagaaccagctct |
| | | acaacgaactcaatcttggtcggagagaggagtacgacgtgctggacaagcggagaggacggg |
| | | acccagaaatgggcgggaagccgcgcagaaagaatccccaagagggcctgtacaacgagctcc |
| | | aaaaggataagatggcagaagcctatagcgagattggtatgaaaggggaacgcagaagaggcaa |
| | | aggccacgacggactgtaccagggactcagcaccgccaccaaggacacctatgacgctcttcac |
| | | atgcaggccctgccgcctcgg |
| CAR123-1 | 98 | malpvtalllplalllhaarpqvqlvqsgaevkkpgasvkvsckasgytftgyymhwvrqapg |
| AA | | qglewmgwinpnsggtnyaqkfqgrvtmtrdtsistaymelsrlrsddtavyycardmnilat |
| | | vpfdiwgqgtmvtvssggggsggggsggggsdiqmtqspsslsasvgdrvtitcrasqsistyl |
| | | nwyqqkpgkapnlliyaafslqsgvpsrfsgsgsgtdftltinslqpedfatyycqqgdsvpltfg |
| | | ggtkleiktttpaprpptpaptiasqplslrpeacrpaaggavhtrgldfacdiyiwaplagtcgvll |
| | | lslvitlyckrgrkkllyifkqpfmrpvqttqeedgcscrfpeeeeggcelrvkfsrsadapaykq |
| | | gqnqlynelnlgrreeydvldkrrgrdpemggkprrknpqeglynelqkdkmaeayseigm |
| | | kgerrrgkghdglyqglstatkdtydalhmqalppr |
| CAR123-1 | 157 | malpvtalllplalllhaarpqvqlvqsgaevkkpgasvkvsckasgytftgyymhwvrqapg |
| scFv | | qglewmgwinpnsggtnyaqkfqgrvtmtrdtsistaymelsrlrsddtavyycardmnilat |
| | | vpfdiwgqgtmvtvssggggsggggsggggsdiqmtqspsslsasvgdrvtitcrasqsistyl |
| | | nwyqqkpgkapnlliyaafslqsgvpsrfsgsgsgtdftltinslqpedfatyycqqgdsvpltfg |
| | | ggtkleik |
| CAR123-1 | 216 | QVQLVQSGAEVKKPGASVKVSCKASGYTFTGYYMHWVRQAP |
| VH | | GQGLEWMGWINPNSGGTNYAQKFQGRVTMTRDTSISTAYME |
| | | LSRLRSDDTAVYYCARDMNILATVPFDIWGQGTMVTVSS |
| CAR123-1 | 275 | DIQMTQSPSSLSASVGDRVTITCRASQSISTYLNWYQQKPGKAP |
| VL | | NLLIYAAFSLQSGVPSRFSGSGSGTDFTLTINSLQPEDFATYYCQ |
| | | QGDSVPLTFGGGTKLEIK |

TABLE 12A
Humanized CD123 CAR Sequences

| Name | SEQ ID | Sequence |
|---|---|---|
| hzCAR123- | 66 | ATGGCCCTCCCTGTCACCGCCCTGCTGCTTCCGCTGGCTCTTCTG |
| 1 NT | | CTCCACGCCGCTCGGCCCCAAGTGCAGCTGGTCCAGTCGGGAGC |
| | | CGAAGTCAAGAAGCCCGGCGCTAGCGTGAAAGTGTCCTGCAAAG |
| | | CCTCCGGGTACACATTCACCTCCTACTGGATGAATTGGGTCAGAC |
| | | AGGCGCCCGGCCAGGGACTCGAGTGGATGGGAAGGATTGATCCT |
| | | TACGACTCCGAAACCCATTACAACCAGAAGTTCAAGGACCGCGT |
| | | GACCATGACTGTGGATAAGTCCACTTCCACCGCTTACATGGAGCT |
| | | GTCCAGCCTGCGCTCCGAGGATACCGCAGTGTACTACTGCGCCC |
| | | GGGGAAACTGGGACGACTATTGGGGACAGGGAACTACCGTGAC |
| | | CGTGTCAAGCGGGGGTGGCGGTAGCGGAGGAGGGGGCTCCGGC |
| | | GGCGGCGGCTCAGGGGGCGGAGGAAGCGACGTGCAGCTCACCC |
| | | AGTCGCCCTCATTTCTGTCGGCCTCAGTGGGAGACAGAGTGACC |
| | | ATTACTTGTCGGGCCTCCAAGAGCATCTCCAAGGACCTGGCCTG |
| | | GTATCAGCAGAAGCCAGGAAAGGCGCCTAAGTTGCTCATCTACT |
| | | CGGGGTCGACCCTGCAATCTGGCGTGCCGTCCCGGTTCTCCGGTT |
| | | CGGGAAGCGGTACCGAATTCACCCTTACTATCTCCTCCCTGCAAC |
| | | CGGAGGACTTCGCCACCTACTACTGCCAACAGCACAACAAGTAC |
| | | CCGTACACTTTCGGGGGTGGCACGAAGGTCGAAATCAAGACCAC |
| | | TACCCCAGCACCGAGGCCACCCACCCCGGCTCCTACCATCGCCTC |
| | | CCAGCCTCTGTCCCTGCGTCCGGAggcatgtagacccgcagctggtggggccgtgc |
| | | atacccggggtcttgacttcgcctgcgatatctacatttgggcccctctggctggtacttgcggggtcctgctg |
| | | ctttcactcgtgatcactctttactgtaagcgcggtcggaagaagctgctgtacatctttaagcaacccttcatg |
| | | aggcctgtgcagactactcaagaggaggacggctgttcatgccggttcccagaggaggaggaaggcggc |
| | | tgcgaactgcgcgtgaaattcagccgcagcgcagatgctccagcctacaagcaggggcagaaccagctct |
| | | acaacgaactcaatcttggtcggagagaggagtacgacgtgctggacaagcggagaggacgggaccca |
| | | gaaatgggcgggaagccgcgcagaaagaatccccaagagggcctgtacaacgagctccaaaaggataa |
| | | gatggcagaagcctatagcgagattggtatgaaaggggaacgcagaagaggcaaaggccacgacggac |
| | | tgtaccagggactcagcaccgccaccaaggacacctatgacgctcttcacatgcaggccctgccgcctcgg |
| hzCAR123- | 125 | MALPVTALLLPLALLLHAARPQVQLVQSGAEVKKPGASVKVSCKA |
| 1 AA | | SGYTFTSYWMNWVRQAPGQGLEWMGRIDPYDSETHYNQKFKDRV |
| | | TMTVDKSTSTAYMELSSLRSEDTAVYYCARGNWDDYWGQGTTVT |
| | | VSSGGGGSGGGGSGGGGSGGGGSDVQLTQSPSFLSASVGDRVTITC |
| | | RASKSISKDLAWYQQKPGKAPKLLIYSGSTLQSGVPSRFSGSGSGTE |
| | | FTLTISSLQPEDFATYYCQQHNKYPYTFGGGTKVEIKTTTPAPRPPTP |
| | | APTIASQPLSLRPEACRPAAGGAVHTRGLDFACDIYIWAPLAGTCGV |
| | | LLLSLVITLYCKRGRKKLLYIFKQPFMRPVQTTQEEDGCSCRFPEEEE |
| | | GGCELRVKFSRSADAPAYKQGQNQLYNELNLGRREEYDVLDKRRG |
| | | RDPEMGGKPRRKNPQEGLYNELQKDKMAEAYSEIGMKGERRRGK |
| | | GHDGLYQGLSTATKDTYDALHMQALPPR |
| hzCAR123-1 | 184 | MALPVTALLLPLALLLHAARPQVQLVQSGAEVKKPGASVKVSCKA |
| scFv | | SGYTFTSYWMNWVRQAPGQGLEWMGRIDPYDSETHYNQKFKDRV |
| | | TMTVDKSTSTAYMELSSLRSEDTAVYYCARGNWDDYWGQGTTVT |
| | | VSSGGGGSGGGGSGGGGSGGGGSDVQLTQSPSFLSASVGDRVTITC |
| | | RASKSISKDLAWYQQKPGKAPKLLIYSGSTLQSGVPSRFSGSGSGTE |
| | | FTLTISSLQPEDFATYYCQQHNKYPYTFGGGTKVEIK |
| hzCAR123- | 243 | QVQLVQSGAEVKKPGASVKVSCKASGYTFTSYWMNWVRQAPGQG |
| 1 VH | | LEWMGRIDPYDSETHYNQKFKDRVTMTVDKSTSTAYMELSSLRSE |
| | | DTAVYYCARGNWDDYWGQGTTVTVSS |
| hzCAR123- | 302 | DVQLTQSPSFLSASVGDRVTITCRASKSISKDLAWYQQKPGKAPKLL |
| 1 VL | | IYSGSTLQSGVPSRFSGSGSGTEFTLTISSLQPEDFATYYCQQHNKYP |
| | | YTFGGGTKVEIK |
| hzCAR123- | 67 | ATGGCCCTCCCTGTCACCGCCCTGCTGCTTCCGCTGGCTCTTCTG |
| 2 NT | | CTCCACGCCGCTCGGCCCCAAGTGCAGCTGGTCCAGTCGGGAGC |
| | | CGAAGTCAAGAAGCCCGGCGCTAGCGTGAAAGTGTCCTGCAAAG |
| | | CCTCCGGGTACACATTCACCTCCTACTGGATGAATTGGGTCAGAC |
| | | AGGCGCCCGGCCAGGGACTCGAGTGGATGGGAAGGATTGATCCT |
| | | TACGACTCCGAAACCCATTACAACCAGAAGTTCAAGGACCGCGT |
| | | GACCATGACTGTGGATAAGTCCACTTCCACCGCTTACATGGAGCT |
| | | GTCCAGCCTGCGCTCCGAGGATACCGCAGTGTACTACTGCGCCC |
| | | GGGGAAACTGGGACGACTATTGGGGACAGGGAACTACCGTGAC |
| | | CGTGTCAAGCGGGGGTGGCGGTAGCGGAGGAGGGGGCTCCGGC |
| | | GGCGGCGGCTCAGGGGGCGGAGGAAGCGAAGTGGTGCTGACCC |
| | | AGTCGCCCGCAACCCTCTCTCTGTCGCCGGGAGAACGCGCCACT |
| | | CTTTCCTGTCGGGCGTCCAAGAGCATCTCAAAGGACCTCGCCTGG |
| | | TACCAGCAGAAGCCTGGTCAAGCCCCGCGGCTGCTGATCTACTC |
| | | CGGCTCCACGCTGCAATCAGGAATCCCAGCCAGATTTTCCGGTTC |
| | | GGGGTCGGGGACTGACTTCACCTTGACCATTAGCTCGCTGGAAC |
| | | CTGAGGACTTCGCCGTGTATTACTGCCAGCAGCACAACAAGTAC |
| | | CCGTACACCTTCGGAGGCGGTACTAAGGTCGAGATCAAGACCAC |
| | | TACCCCAGCACCGAGGCCACCCACCCCGGCTCCTACCATCGCCTC |
| | | CCAGCCTCTGTCCCTGCGTCCGGAggcatgtagacccgcagctggtggggccgtgc |
| | | atacccggggtcttgacttcgcctgcgatatctacatttgggcccctctggctggtacttgcggggtcctgctg |
| | | ctttcactcgtgatcactctttactgtaagcgcggtcggaagaagctgctgtacatctttaagcaacccttcatg |
| | | aggcctgtgcagactactcaagaggaggacggctgttcatgccggttcccagaggaggaggaaggcggc |
| | | tgcgaactgcgcgtgaaattcagccgcagcgcagatgctccagcctacaagcaggggcagaaccagctct |
| | | acaacgaactcaatcttggtcggagagaggagtacgacgtgctggacaagcggagaggacgggaccca |
| | | gaaatgggcgggaagccgcgcagaaagaatccccaagagggcctgtacaacgagctccaaaaggataa |
| | | gatggcagaagcctatagcgagattggtatgaaaggggaacgcagaagaggcaaaggccacgacggac |
| | | tgtaccagggactcagcaccgccaccaaggacacctatgacgctcttcacatgcaggccctgccgcctcgg |
| hzCAR123- | 126 | MALPVTALLLPLALLLHAARPQVQLVQSGAEVKKPGASVKVSCKA |
| 2 AA | | SGYTFTSYWMNWVRQ |
| | | APGQGLEWMGRIDPYDSETHYNQKFKDRVTMTVDKSTSTAYMELS |
| | | SLRSEDTAVYYCARG |
| | | NWDDYWGQGTTVTVSSGGGGSGGGGSGGGGSGGGGSEVVLTQSP |
| | | ATLSLSPGERATLSCR |
| | | ASKSISKDLAWYQQKPGQAPRLLIYSGSTLQSGIPARFSGSGSGTDFT |
| | | LTISSLEPEDFA |
| | | VYYCQQHNKYPYTFGGGTKVEIKTTTPAPRPPTPAPTIASQPLSLRPE |
| | | ACRPAAGGAVHT |
| | | RGLDFACDIYIWAPLAGTCGVLLLSLVITLYCKRGRKKLLYIFKQPF |
| | | MRPVQTTQEEDGC |
| | | SCRFPEEEEGGCELRVKFSRSADAPAYKQGQNQLYNELNLGRREEY |
| | | DVLDKRRGRDPEMG |
| | | GKPRRKNPQEGLYNELQKDKMAEAYSEIGMKGERRRGKGHDGLY |
| | | QGLSTATKDTYDALHM |
| | | QALPPR |
| hzCAR123-2 | 185 | MALPVTALLLPLALLLHAARPQVQLVQSGAEVKKPGASVKVSCKA |
| scFv | | SGYTFTSYWMNWVRQ |
| | | APGQGLEWMGRIDPYDSETHYNQKFKDRVTMTVDKSTSTAYMELS |
| | | SLRSEDTAVYYCARG |
| | | NWDDYWGQGTTVTVSSGGGGSGGGGSGGGGSGGGGSEVVLTQSP |
| | | ATLSLSPGERATLSCR |
| | | ASKSISKDLAWYQQKPGQAPRLLIYSGSTLQSGIPARFSGSGSGTDFT |
| | | LTISSLEPEDFA |
| | | VYYCQQHNKYPYTFGGGTKVEIK |
| hzCAR123- | 244 | QVQLVQSGAEVKKPGASVKVSCKASGYTFTSYWMNWVRQAPGQG |
| 2 VH | | LEWMGRIDPYDSETHYNQKFKDRVTMTVDKSTSTAYMELSSLRSE |
| | | DTAVYYCARGNWDDYWGQGTTVTVSS |
| hzCAR123- | 303 | EVVLTQSPATLSLSPGERATLSCRASKSISKDLAWYQQKPGQAPRLL |
| 2 VL | | IYSGSTLQSGIPARFSGSGSGTDFTLTISSLEPEDFAVYYCQQHNKYP |
| | | YTFGGGTKVEIK |
| hzCAR123- | 68 | ATGGCCCTCCCTGTCACCGCCCTGCTGCTTCCGCTGGCTCTTCTG |
| 3 NT | | CTCCACGCCGCTCGGCCCCAAGTGCAGCTGGTCCAGTCGGGAGC |
| | | CGAAGTCAAGAAGCCCGGCGCTAGCGTGAAAGTGTCCTGCAAAG |
| | | CCTCCGGGTACACATTCACCTCCTACTGGATGAATTGGGTCAGAC |
| | | AGGCGCCCGGCCAGGGACTCGAGTGGATGGGAAGGATTGATCCT |
| | | TACGACTCCGAAACCCATTACAACCAGAAGTTCAAGGACCGCGT |
| | | GACCATGACTGTGGATAAGTCCACTTCCACCGCTTACATGGAGCT |
| | | GTCCAGCCTGCGCTCCGAGGATACCGCAGTGTACTACTGCGCCC |
| | | GGGGAAACTGGGACGACTATTGGGGACAGGGAACTACCGTGAC |
| | | CGTGTCAAGCGGGGGTGGCGGTAGCGGAGGAGGGGGCTCCGGC |
| | | GGCGGCGGCTCAGGGGGCGGAGGAAGCGACGTCGTGATGACCC |
| | | AGTCACCGGCATTCCTGTCCGTGACTCCCGGAGAAAAGGTCACG |
| | | ATTACTTGCCGGGCGTCCAAGAGCATCTCCAAGGACCTCGCCTG |
| | | GTACCAACAGAAGCCGGACCAGGCCCCTAAGCTGTTGATCTACT |
| | | CGGGGTCCACCCTTCAATCGGGAGTGCCATCGCGGTTTAGCGGTT |
| | | CGGGTTCTGGGACCGACTTCACTTTCACCATCTCCTCACTGGAAG |
| | | CCGAGGATGCCGCCACTTACTACTGTCAGCAGCACAACAAGTAT |
| | | CCGTACACCTTCGGAGGCGGTACCAAAGTGGAGATCAAGACCAC |
| | | TACCCCAGCACCGAGGCCACCCACCCCGGCTCCTACCATCGCCTC |
| | | CCAGCCTCTGTCCCTGCGTCCGGAggcatgtagacccgcagctggtggggccgtgc |
| | | atacccggggtcttgacttcgcctgcgatatctacatttgggcccctctggctggtacttgcggggtcctgctg |
| | | ctttcactcgtgatcactctttactgtaagcgcggtcggaagaagctgctgtacatctttaagcaacccttcatg |
| | | aggcctgtgcagactactcaagaggaggacggctgttcatgccggttcccagaggaggaggaaggcggc |
| | | tgcgaactgcgcgtgaaattcagccgcagcgcagatgctccagcctacaagcaggggcagaaccagctct |
| | | acaacgaactcaatcttggtcggagagaggagtacgacgtgctggacaagcggagaggacgggaccca |
| | | gaaatgggcgggaagccgcgcagaaagaatccccaagagggcctgtacaacgagctccaaaaggataa |
| | | gatggcagaagcctatagcgagattggtatgaaaggggaacgcagaagaggcaaaggccacgacggac |
| | | tgtaccagggactcagcaccgccaccaaggacacctatgacgctcttcacatgcaggccctgccgcctcgg |
| hzCAR123- | 127 | MALPVTALLLPLALLLHAARPQVQLVQSGAEVKKPGASVKVSCKA |
| 3 AA | | SGYTFTSYWMNWVRQ |
| | | APGQGLEWMGRIDPYDSETHYNQKFKDRVTMTVDKSTSTAYMELS |
| | | SLRSEDTAVYYCARG |
| | | NWDDYWGQGTTVTVSSGGGGSGGGGSGGGGSGGGGSDVVMTQS |
| | | PAFLSVTPGEKVTITCR |
| | | ASKSISKDLAWYQQKPDQAPKLLIYSGSTLQSGVPSRFSGSGSGTDF |
| | | TFTISSLEAEDAA |
| | | TYYCQQHNKYPYTFGGGTKVEIKTTTPAPRPPTPAPTIASQPLSLRPE |
| | | ACRPAAGGAVHT |
| | | RGLDFACDIYIWAPLAGTCGVLLLSLVITLYCKRGRKKLLYIFKQPF |
| | | MRPVQTTQEEDGC |
| | | SCRFPEEEEGGCELRVKFSRSADAPAYKQGQNQLYNELNLGRREEY |
| | | DVLDKRRGRDPEMG |
| | | GKPRRKNPQEGLYNELQKDKMAEAYSEIGMKGERRRGKGHDGLY |
| | | QGLSTATKDTYDALHM |
| | | QALPPR |
| hzCAR123-3 | 186 | MALPVTALLLPLALLLHAARPQVQLVQSGAEVKKPGASVKVSCKA |
| scFv | | SGYTFTSYWMNWVRQ |
| | | APGQGLEWMGRIDPYDSETHYNQKFKDRVTMTVDKSTSTAYMELS |
| | | SLRSEDTAVYYCARG |
| | | NWDDYWGQGTTVTVSSGGGGSGGGGSGGGGSGGGGSDVVMTQS |
| | | PAFLSVTPGEKVTITCR |
| | | ASKSISKDLAWYQQKPDQAPKLLIYSGSTLQSGVPSRFSGSGSGTDF |
| | | TFTISSLEAEDAA |
| | | TYYCQQHNKYPYTFGGGTKVEIK |
| hzCAR123- | 245 | QVQLVQSGAEVKKPGASVKVSCKASGYTFTSYWMNWVRQAPGQG |
| 3 VH | | LEWMGRIDPYDSETHYNQKFKDRVTMTVDKSTSTAYMELSSLRSE |
| | | DTAVYYCARGNWDDYWGQGTTVTVSS |
| hzCAR123- | 304 | DVVMTQSPAFLSVTPGEKVTITCRASKSISKDLAWYQQKPDQAPKL |
| 3 VL | | LIYSGSTLQSGVPSRFSGSGSGTDFTFTISSLEAEDAATYYCQQHNKY |
| | | PYTFGGGTKVEIK |
| hzCAR123- | 69 | ATGGCCCTCCCTGTCACCGCCCTGCTGCTTCCGCTGGCTCTTCTG |
| 4 NT | | CTCCACGCCGCTCGGCCCCAAGTGCAGCTGGTCCAGTCGGGAGC |
| | | CGAAGTCAAGAAGCCCGGCGCTAGCGTGAAAGTGTCCTGCAAAG |
| | | CCTCCGGGTACACATTCACCTCCTACTGGATGAATTGGGTCAGAC |
| | | AGGCGCCCGGCCAGGGACTCGAGTGGATGGGAAGGATTGATCCT |
| | | TACGACTCCGAAACCCATTACAACCAGAAGTTCAAGGACCGCGT |
| | | GACCATGACTGTGGATAAGTCCACTTCCACCGCTTACATGGAGCT |
| | | GTCCAGCCTGCGCTCCGAGGATACCGCAGTGTACTACTGCGCCC |
| | | GGGGAAACTGGGACGACTATTGGGGACAGGGAACTACCGTGAC |
| | | CGTGTCAAGCGGGGGTGGCGGTAGCGGAGGAGGGGGCTCCGGC |
| | | GGCGGCGGCTCAGGGGGCGGAGGAAGCGACGTGGTCATGACTC |
| | | AGTCCCCGGACTCACTCGCGGTGTCGCTTGGAGAGAGAGCGACC |
| | | ATCAACTGTCGGGCCTCAAAGAGCATCAGCAAGGACCTGGCCTG |
| | | GTACCAGCAGAAGCCGGGACAGCCGCCAAAGCTGCTGATCTACT |
| | | CCGGGTCCACCTTGCAATCTGGTGTCCCTGACCGGTTCTCCGGTT |
| | | CCGGGTCGGGTACCGACTTCACGCTCACTATTTCGTCGCTGCAAG |
| | | CCGAAGATGTGGCCGTGTACTATTGCCAACAGCACAACAAGTAC |
| | | CCCTACACTTTTGGCGGAGGCACCAAGGTGGAAATCAAGACCAC |
| | | TACCCCAGCACCGAGGCCACCCACCCCGGCTCCTACCATCGCCTC |
| | | CCAGCCTCTGTCCCTGCGTCCGGAggcatgtagacccgcagctggtggggccgtgc |
| | | atacccggggtcttgacttcgcctgcgatatctacatttgggcccctctggctggtacttgcggggtcctgctg |
| | | ctttcactcgtgatcactctttactgtaagcgcggtcggaagaagctgctgtacatctttaagcaacccttcatg |
| | | aggcctgtgcagactactcaagaggaggacggctgttcatgccggttcccagaggaggaggaaggcggc |
| | | tgcgaactgcgcgtgaaattcagccgcagcgcagatgctccagcctacaagcaggggcagaaccagctct |
| | | acaacgaactcaatcttggtcggagagaggagtacgacgtgctggacaagcggagaggacgggaccca |
| | | gaaatgggcgggaagccgcgcagaaagaatccccaagagggcctgtacaacgagctccaaaaggataa |
| | | gatggcagaagcctatagcgagattggtatgaaaggggaacgcagaagaggcaaaggccacgacggac |
| | | tgtaccagggactcagcaccgccaccaaggacacctatgacgctcttcacatgcaggccctgccgcctcgg |
| hzCAR123- | 128 | MALPVTALLLPLALLLHAARPQVQLVQSGAEVKKPGASVKVSCKA |
| 4 AA | | SGYTFTSYWMNWVRQ |
| | | APGQGLEWMGRIDPYDSETHYNQKFKDRVTMTVDKSTSTAYMELS |
| | | SLRSEDTAVYYCARG |
| | | NWDDYWGQGTTVTVSSGGGGSGGGGSGGGGSGGGGSDVVMTQS |
| | | PDSLAVSLGERATINCR |
| | | ASKSISKDLAWYQQKPGQPPKLLIYSGSTLQSGVPDRFSGSGSGTDF |
| | | TLTISSLQAEDVA |
| | | VYYCQQHNKYPYTFGGGTKVEIKTTTPAPRPPTPAPTIASQPLSLRPE |
| | | ACRPAAGGAVHT |
| | | RGLDFACDIYIWAPLAGTCGVLLLSLVITLYCKRGRKKLLYIFKQPF |
| | | MRPVQTTQEEDGC |
| | | SCRFPEEEEGGCELRVKFSRSADAPAYKQGQNQLYNELNLGRREEY |
| | | DVLDKRRGRDPEMG |
| | | GKPRRKNPQEGLYNELQKDKMAEAYSEIGMKGERRRGKGHDGLY |
| | | QGLSTATKDTYDALHM |
| | | QALPPR |
| hzCAR123-4 | 187 | MALPVTALLLPLALLLHAARPQVQLVQSGAEVKKPGASVKVSCKA |
| scFv | | SGYTFTSYWMNWVRQ |
| | | APGQGLEWMGRIDPYDSETHYNQKFKDRVTMTVDKSTSTAYMELS |
| | | SLRSEDTAVYYCARG |
| | | NWDDYWGQGTTVTVSSGGGGSGGGGSGGGGSGGGGSDVVMTQS |
| | | PDSLAVSLGERATINCR |
| | | ASKSISKDLAWYQQKPGQPPKLLIYSGSTLQSGVPDRFSGSGSGTDF |
| | | TLTISSLQAEDVA |
| | | VYYCQQHNKYPYTFGGGTKVEIK |
| hzCAR123- | 246 | QVQLVQSGAEVKKPGASVKVSCKASGYTFTSYWMNWVRQAPGQG |
| 4 VH | | LEWMGRIDPYDSETHYNQKFKDRVTMTVDKSTSTAYMELSSLRSE |
| | | DTAVYYCARGNWDDYWGQGTTVTVSS |
| hzCAR123- | 305 | DVVMTQSPDSLAVSLGERATINCRASKSISKDLAWYQQKPGQPPKL |
| 4 VL | | LIYSGSTLQSGVPDRFSGSGSGTDFTLTISSLQAEDVAVYYCQQHNK |
| | | YPYTFGGGTKVEIK |
| hzCAR123- | 70 | ATGGCCCTCCCTGTCACCGCCCTGCTGCTTCCGCTGGCTCTTCTG |
| 5 NT | | CTCCACGCCGCTCGGCCCGACGTGCAGCTCACCCAGTCGCCCTCA |
| | | TTTCTGTCGGCCTCAGTGGGAGACAGAGTGACCATTACTTGTCGG |
| | | GCCTCCAAGAGCATCTCCAAGGACCTGGCCTGGTATCAGCAGAA |
| | | GCCAGGAAAGGCGCCTAAGTTGCTCATCTACTCGGGGTCGACCC |
| | | TGCAATCTGGCGTGCCGTCCCGGTTCTCCGGTTCGGGAAGCGGTA |
| | | CCGAATTCACCCTTACTATCTCCTCCCTGCAACCGGAGGACTTCG |
| | | CCACCTACTACTGCCAACAGCACAACAAGTACCCGTACACTTTC |
| | | GGGGGTGGCACGAAGGTCGAAATCAAGGGGGGTGGCGGTAGCG |
| | | GAGGAGGGGGCTCCGGCGGCGGCGGCTCAGGGGGCGGAGGAAG |
| | | CCAAGTGCAGCTGGTCCAGTCGGGAGCCGAAGTCAAGAAGCCCG |
| | | GCGCTAGCGTGAAAGTGTCCTGCAAAGCCTCCGGGTACACATTC |
| | | ACCTCCTACTGGATGAATTGGGTCAGACAGGCGCCCGGCCAGGG |
| | | ACTCGAGTGGATGGGAAGGATTGATCCTTACGACTCCGAAACCC |
| | | ATTACAACCAGAAGTTCAAGGACCGCGTGACCATGACTGTGGAT |
| | | AAGTCCACTTCCACCGCTTACATGGAGCTGTCCAGCCTGCGCTCC |
| | | GAGGATACCGCAGTGTACTACTGCGCCCGGGGAAACTGGGACGA |
| | | CTATTGGGGACAGGGAACTACCGTGACCGTGTCAAGCACCACTA |
| | | CCCCAGCACCGAGGCCACCCACCCCGGCTCCTACCATCGCCTCCC |
| | | AGCCTCTGTCCCTGCGTCCGGAggcatgtagacccgcagctggtggggccgtgcata |
| | | cccggggtcttgacttcgcctgcgatatctacatttgggcccctctggctggtacttgcggggtcctgctgcttt |
| | | cactcgtgatcactctttactgtaagcgcggtcggaagaagctgctgtacatctttaagcaacccttcatgagg |
| | | cctgtgcagactactcaagaggaggacggctgttcatgccggttcccagaggaggaggaaggcggctgc |
| | | gaactgcgcgtgaaattcagccgcagcgcagatgctccagcctacaagcaggggcagaaccagctctac |
| | | aacgaactcaatcttggtcggagagaggagtacgacgtgctggacaagcggagaggacgggacccaga |
| | | aatgggcgggaagccgcgcagaaagaatccccaagagggcctgtacaacgagctccaaaaggataaga |
| | | tggcagaagcctatagcgagattggtatgaaaggggaacgcagaagaggcaaaggccacgacggactgt |
| | | accagggactcagcaccgccaccaaggacacctatgacgctcttcacatgcaggccctgccgcctcgg |
| hzCAR123- | 129 | MALPVTALLLPLALLLHAARPDVQLTQSPSFLSASVGDRVTITCRAS |
| 5 AA | | KSISKDLAWYQQK |
| | | PGKAPKLLIYSGSTLQSGVPSRFSGSGSGTEFTLTISSLQPEDFATYYC |
| | | QQHNKYPYTFG |
| | | GGTKVEIKGGGGSGGGGSGGGGSGGGGSQVQLVQSGAEVKKPGAS |
| | | VKVSCKASGYTFTSY |
| | | WMNWVRQAPGQGLEWMGRIDPYDSETHYNQKFKDRVTMTVDKS |
| | | TSTAYMELSSLRSEDTA |
| | | VYYCARGNWDDYWGQGTTVTVSSTTTPAPRPPTPAPTIASQPLSLR |
| | | PEACRPAAGGAVHT |
| | | RGLDFACDIYIWAPLAGTCGVLLLSLVITLYCKRGRKKLLYIFKQPF |
| | | MRPVQTTQEEDGC |
| | | SCRFPEEEEGGCELRVKFSRSADAPAYKQGQNQLYNELNLGRREEY |
| | | DVLDKRRGRDPEMG |
| | | GKPRRKNPQEGLYNELQKDKMAEAYSEIGMKGERRRGKGHDGLY |
| | | QGLSTATKDTYDALHM |
| | | QALPPR |
| hzCAR123-5 | 188 | MALPVTALLLPLALLLHAARPDVQLTQSPSFLSASVGDRVTITCRAS |
| scFv | | KSISKDLAWYQQK |
| | | PGKAPKLLIYSGSTLQSGVPSRFSGSGSGTEFTLTISSLQPEDFATYYC |
| | | QQHNKYPYTFG |
| | | GGTKVEIKGGGGSGGGGSGGGGSGGGGSQVQLVQSGAEVKKPGAS |
| | | VKVSCKASGYTFTSY |
| | | WMNWVRQAPGQGLEWMGRIDPYDSETHYNQKFKDRVTMTVDKS |
| | | TSTAYMELSSLRSEDTA |
| | | VYYCARGNWDDYWGQGTTVTVSS |
| hzCAR123- | 247 | QVQLVQSGAEVKKPGASVKVSCKASGYTFTSYWMNWVRQAPGQG |
| 5 VH | | LEWMGRIDPYDSETHYNQKFKDRVTMTVDKSTSTAYMELSSLRSE |
| | | DTAVYYCARGNWDDYWGQGTTVTVSS |
| hzCAR123- | 306 | DVQLTQSPSFLSASVGDRVTITCRASKSISKDLAWYQQKPGKAPKLL |
| 5 VL | | IYSGSTLQSGVPSRFSGSGSGTEFTLTISSLQPEDFATYYCQQHNKYP |
| | | YTFGGGTKVEIK |
| hzCAR123- | 71 | ATGGCCCTCCCTGTCACCGCCCTGCTGCTTCCGCTGGCTCTTCTG |
| 6 NT | | CTCCACGCCGCTCGGCCCGAAGTGGTGCTGACCCAGTCGCCCGC |
| | | AACCCTCTCTCTGTCGCCGGGAGAACGCGCCACTCTTTCCTGTCG |
| | | GGCGTCCAAGAGCATCTCAAAGGACCTCGCCTGGTACCAGCAGA |
| | | AGCCTGGTCAAGCCCCGCGGCTGCTGATCTACTCCGGCTCCACGC |
| | | TGCAATCAGGAATCCCAGCCAGATTTTCCGGTTCGGGGTCGGGG |
| | | ACTGACTTCACCTTGACCATTAGCTCGCTGGAACCTGAGGACTTC |
| | | GCCGTGTATTACTGCCAGCAGCACAACAAGTACCCGTACACCTT |
| | | CGGAGGCGGTACTAAGGTCGAGATCAAGGGGGGTGGCGGTAGC |
| | | GGAGGAGGGGGCTCCGGCGGCGGCGGCTCAGGGGGCGGAGGAA |
| | | GCCAAGTGCAGCTGGTCCAGTCGGGAGCCGAAGTCAAGAAGCCC |
| | | GGCGCTAGCGTGAAAGTGTCCTGCAAAGCCTCCGGGTACACATT |
| | | CACCTCCTACTGGATGAATTGGGTCAGACAGGCGCCCGGCCAGG |
| | | GACTCGAGTGGATGGGAAGGATTGATCCTTACGACTCCGAAACC |
| | | CATTACAACCAGAAGTTCAAGGACCGCGTGACCATGACTGTGGA |
| | | TAAGTCCACTTCCACCGCTTACATGGAGCTGTCCAGCCTGCGCTC |
| | | CGAGGATACCGCAGTGTACTACTGCGCCCGGGGAAACTGGGACG |
| | | ACTATTGGGGACAGGGAACTACCGTGACCGTGTCAAGCACCACT |
| | | ACCCCAGCACCGAGGCCACCCACCCCGGCTCCTACCATCGCCTC |
| | | CCAGCCTCTGTCCCTGCGTCCGGAggcatgtagacccgcagctggtggggccgtgc |
| | | atacccggggtcttgacttcgcctgcgatatctacatttgggcccctctggctggtacttgcggggtcctgctg |
| | | ctttcactcgtgatcactctttactgtaagcgcggtcggaagaagctgctgtacatctttaagcaacccttcatg |
| | | aggcctgtgcagactactcaagaggaggacggctgttcatgccggttcccagaggaggaggaaggcggc |
| | | tgcgaactgcgcgtgaaattcagccgcagcgcagatgctccagcctacaagcaggggcagaaccagctct |
| | | acaacgaactcaatcttggtcggagagaggagtacgacgtgctggacaagcggagaggacgggaccca |
| | | gaaatgggcgggaagccgcgcagaaagaatccccaagagggcctgtacaacgagctccaaaaggataa |
| | | gatggcagaagcctatagcgagattggtatgaaaggggaacgcagaagaggcaaaggccacgacggac |
| | | tgtaccagggactcagcaccgccaccaaggacacctatgacgctcttcacatgcaggccctgccgcctcgg |
| hzCAR123- | 130 | MALPVTALLLPLALLLHAARPEVVLTQSPATLSLSPGERATLSCRAS |
| 6 AA | | KSISKDLAWYQQK |
| | | PGQAPRLLIYSGSTLQSGIPARFSGSGSGTDFTLTISSLEPEDFAVYYC |
| | | QQHNKYPYTFG |
| | | GGTKVEIKGGGGSGGGGSGGGGSGGGGSQVQLVQSGAEVKKPGAS |
| | | VKVSCKASGYTFTSY |
| | | WMNWVRQAPGQGLEWMGRIDPYDSETHYNQKFKDRVTMTVDKS |
| | | TSTAYMELSSLRSEDTA |
| | | VYYCARGNWDDYWGQGTTVTVSSTTTPAPRPPTPAPTIASQPLSLR |
| | | PEACRPAAGGAVHT |
| | | RGLDFACDIYIWAPLAGTCGVLLLSLVITLYCKRGRKKLLYIFKQPF |
| | | MRPVQTTQEEDGC |
| | | SCRFPEEEEGGCELRVKFSRSADAPAYKQGQNQLYNELNLGRREEY |
| | | DVLDKRRGRDPEMG |
| | | GKPRRKNPQEGLYNELQKDKMAEAYSEIGMKGERRRGKGHDGLY |
| | | QGLSTATKDTYDALHM |
| | | QALPPR |
| hzCAR123-6 | 189 | MALPVTALLLPLALLLHAARPEVVLTQSPATLSLSPGERATLSCRAS |
| scFv | | KSISKDLAWYQQK |
| | | PGQAPRLLIYSGSTLQSGIPARFSGSGSGTDFTLTISSLEPEDFAVYYC |
| | | QQHNKYPYTFG |
| | | GGTKVEIKGGGGSGGGGSGGGGSGGGGSQVQLVQSGAEVKKPGAS |
| | | VKVSCKASGYTFTSY |
| | | WMNWVRQAPGQGLEWMGRIDPYDSETHYNQKFKDRVTMTVDKS |
| | | TSTAYMELSSLRSEDTA |
| | | VYYCARGNWDDYWGQGTTVTVSS |
| hzCAR123- | 248 | QVQLVQSGAEVKKPGASVKVSCKASGYTFTSYWMNWVRQAPGQG |
| 6 VH | | LEWMGRIDPYDSETHYNQKFKDRVTMTVDKSTSTAYMELSSLRSE |
| | | DTAVYYCARGNWDDYWGQGTTVTVSS |
| hzCAR123- | 307 | EVVLTQSPATLSLSPGERATLSCRASKSISKDLAWYQQKPGQAPRLL |
| 6 VL | | IYSGSTLQSGIPARFSGSGSGTDFTLTISSLEPEDFAVYYCQQHNKYP |
| | | YTFGGGTKVEIK |
| hzCAR123- | 72 | ATGGCCCTCCCTGTCACCGCCCTGCTGCTTCCGCTGGCTCTTCTG |
| 7 NT | | CTCCACGCCGCTCGGCCCGACGTCGTGATGACCCAGTCACCGGC |
| | | ATTCCTGTCCGTGACTCCCGGAGAAAAGGTCACGATTACTTGCCG |
| | | GGCGTCCAAGAGCATCTCCAAGGACCTCGCCTGGTACCAACAGA |
| | | AGCCGGACCAGGCCCCTAAGCTGTTGATCTACTCGGGGTCCACC |
| | | CTTCAATCGGGAGTGCCATCGCGGTTTAGCGGTTCGGGTTCTGGG |
| | | ACCGACTTCACTTTCACCATCTCCTCACTGGAAGCCGAGGATGCC |
| | | GCCACTTACTACTGTCAGCAGCACAACAAGTATCCGTACACCTTC |
| | | GGAGGCGGTACCAAAGTGGAGATCAAGGGGGGTGGCGGTAGCG |
| | | GAGGAGGGGGCTCCGGCGGCGGCGGCTCAGGGGGCGGAGGAAG |
| | | CCAAGTGCAGCTGGTCCAGTCGGGAGCCGAAGTCAAGAAGCCCG |
| | | GCGCTAGCGTGAAAGTGTCCTGCAAAGCCTCCGGGTACACATTC |
| | | ACCTCCTACTGGATGAATTGGGTCAGACAGGCGCCCGGCCAGGG |
| | | ACTCGAGTGGATGGGAAGGATTGATCCTTACGACTCCGAAACCC |
| | | ATTACAACCAGAAGTTCAAGGACCGCGTGACCATGACTGTGGAT |
| | | AAGTCCACTTCCACCGCTTACATGGAGCTGTCCAGCCTGCGCTCC |
| | | GAGGATACCGCAGTGTACTACTGCGCCCGGGGAAACTGGGACGA |
| | | CTATTGGGGACAGGGAACTACCGTGACCGTGTCAAGCACCACTA |
| | | CCCCAGCACCGAGGCCACCCACCCCGGCTCCTACCATCGCCTCCC |
| | | AGCCTCTGTCCCTGCGTCCGGAggcatgtagacccgcagctggtggggccgtgcata |
| | | cccggggtcttgacttcgcctgcgatatctacatttgggcccctctggctggtacttgcggggtcctgctgcttt |
| | | cactcgtgatcactctttactgtaagcgcggtcggaagaagctgctgtacatctttaagcaacccttcatgagg |
| | | cctgtgcagactactcaagaggaggacggctgttcatgccggttcccagaggaggaggaaggcggctgc |
| | | gaactgcgcgtgaaattcagccgcagcgcagatgctccagcctacaagcaggggcagaaccagctctac |
| | | aacgaactcaatcttggtcggagagaggagtacgacgtgctggacaagcggagaggacgggacccaga |
| | | aatgggcgggaagccgcgcagaaagaatccccaagagggcctgtacaacgagctccaaaaggataaga |
| | | tggcagaagcctatagcgagattggtatgaaaggggaacgcagaagaggcaaaggccacgacggactgt |
| | | accagggactcagcaccgccaccaaggacacctatgacgctcttcacatgcaggccctgccgcctcgg |
| hzCAR123- | 131 | MALPVTALLLPLALLLHAARPDVVMTQSPAFLSVTPGEKVTITCRAS |
| 7 AA | | KSISKDLAWYQQK |
| | | PDQAPKLLIYSGSTLQSGVPSRFSGSGSGTDFTFTISSLEAEDAATYY |
| | | CQQHNKYPYTFG |
| | | GGTKVEIKGGGGSGGGGSGGGGSGGGGSQVQLVQSGAEVKKPGAS |
| | | VKVSCKASGYTFTSY |
| | | WMNWVRQAPGQGLEWMGRIDPYDSETHYNQKFKDRVTMTVDKS |
| | | TSTAYMELSSLRSEDTA |
| | | VYYCARGNWDDYWGQGTTVTVSSTTTPAPRPPTPAPTIASQPLSLR |
| | | PEACRPAAGGAVHT |
| | | RGLDFACDIYIWAPLAGTCGVLLLSLVITLYCKRGRKKLLYIFKQPF |
| | | MRPVQTTQEEDGC |
| | | SCRFPEEEEGGCELRVKFSRSADAPAYKQGQNQLYNELNLGRREEY |
| | | DVLDKRRGRDPEMG |
| | | GKPRRKNPQEGLYNELQKDKMAEAYSEIGMKGERRRGKGHDGLY |
| | | QGLSTATKDTYDALHM |
| | | QALPPR |
| hzCAR123-7 | 190 | MALPVTALLLPLALLLHAARPDVVMTQSPAFLSVTPGEKVTITCRAS |
| scFv | | KSISKDLAWYQQK |
| | | PDQAPKLLIYSGSTLQSGVPSRFSGSGSGTDFTFTISSLEAEDAATYY |
| | | CQQHNKYPYTFG |
| | | GGTKVEIKGGGGSGGGGSGGGGSGGGGSQVQLVQSGAEVKKPGAS |
| | | VKVSCKASGYTFTSY |
| | | WMNWVRQAPGQGLEWMGRIDPYDSETHYNQKFKDRVTMTVDKS |
| | | TSTAYMELSSLRSEDTA |
| | | VYYCARGNWDDYWGQGTTVTVSS |
| hzCAR123- | 249 | QVQLVQSGAEVKKPGASVKVSCKASGYTFTSYWMNWVRQAPGQG |
| 7 VH | | LEWMGRIDPYDSETHYNQKFKDRVTMTVDKSTSTAYMELSSLRSE |
| | | DTAVYYCARGNWDDYWGQGTTVTVSS |
| hzCAR123- | 308 | DVVMTQSPAFLSVTPGEKVTITCRASKSISKDLAWYQQKPDQAPKL |
| 7 VL | | LIYSGSTLQSGVPSRFSGSGSGTDFTFTISSLEAEDAATYYCQQHNKY |
| | | PYTFGGGTKVEIK |
| hzCAR123- | 73 | ATGGCCCTCCCTGTCACCGCCCTGCTGCTTCCGCTGGCTCTTCTG |
| 8 NT | | CTCCACGCCGCTCGGCCCGACGTGGTCATGACTCAGTCCCCGGA |
| | | CTCACTCGCGGTGTCGCTTGGAGAGAGAGCGACCATCAACTGTC |
| | | GGGCCTCAAAGAGCATCAGCAAGGACCTGGCCTGGTACCAGCAG |
| | | AAGCCGGGACAGCCGCCAAAGCTGCTGATCTACTCCGGGTCCAC |
| | | CTTGCAATCTGGTGTCCCTGACCGGTTCTCCGGTTCCGGGTCGGG |
| | | TACCGACTTCACGCTCACTATTTCGTCGCTGCAAGCCGAAGATGT |
| | | GGCCGTGTACTATTGCCAACAGCACAACAAGTACCCCTACACTTT |
| | | TGGCGGAGGCACCAAGGTGGAAATCAAGGGGGGTGGCGGTAGC |
| | | GGAGGAGGGGGCTCCGGCGGCGGCGGCTCAGGGGGCGGAGGAA |
| | | GCCAAGTGCAGCTGGTCCAGTCGGGAGCCGAAGTCAAGAAGCCC |
| | | GGCGCTAGCGTGAAAGTGTCCTGCAAAGCCTCCGGGTACACATT |
| | | CACCTCCTACTGGATGAATTGGGTCAGACAGGCGCCCGGCCAGG |
| | | GACTCGAGTGGATGGGAAGGATTGATCCTTACGACTCCGAAACC |
| | | CATTACAACCAGAAGTTCAAGGACCGCGTGACCATGACTGTGGA |
| | | TAAGTCCACTTCCACCGCTTACATGGAGCTGTCCAGCCTGCGCTC |
| | | CGAGGATACCGCAGTGTACTACTGCGCCCGGGGAAACTGGGACG |
| | | ACTATTGGGGACAGGGAACTACCGTGACCGTGTCAAGCACCACT |
| | | ACCCCAGCACCGAGGCCACCCACCCCGGCTCCTACCATCGCCTC |
| | | CCAGCCTCTGTCCCTGCGTCCGGAggcatgtagacccgcagctggtggggccgtgc |
| | | atacccggggtcttgacttcgcctgcgatatctacatttgggcccctctggctggtacttgcggggtcctgctg |
| | | ctttcactcgtgatcactctttactgtaagcgcggtcggaagaagctgctgtacatctttaagcaacccttcatg |
| | | aggcctgtgcagactactcaagaggaggacggctgttcatgccggttcccagaggaggaggaaggcggc |
| | | tgcgaactgcgcgtgaaattcagccgcagcgcagatgctccagcctacaagcaggggcagaaccagctct |
| | | acaacgaactcaatcttggtcggagagaggagtacgacgtgctggacaagcggagaggacgggaccca |
| | | gaaatgggcgggaagccgcgcagaaagaatccccaagagggcctgtacaacgagctccaaaaggataa |
| | | gatggcagaagcctatagcgagattggtatgaaaggggaacgcagaagaggcaaaggccacgacggac |
| | | tgtaccagggactcagcaccgccaccaaggacacctatgacgctcttcacatgcaggccctgccgcctcgg |
| hzCAR123- | 132 | MALPVTALLLPLALLLHAARPDVVMTQSPDSLAVSLGERATINCRA |
| 8 AA | | SKSISKDLAWYQQK |
| | | PGQPPKLLIYSGSTLQSGVPDRFSGSGSGTDFTLTISSLQAEDVAVYY |
| | | CQQHNKYPYTFG |
| | | GGTKVEIKGGGGSGGGGSGGGGSGGGGSQVQLVQSGAEVKKPGAS |
| | | VKVSCKASGYTFTSY |
| | | WMNWVRQAPGQGLEWMGRIDPYDSETHYNQKFKDRVTMTVDKS |
| | | TSTAYMELSSLRSEDTA |
| | | VYYCARGNWDDYWGQGTTVTVSSTTTPAPRPPTPAPTIASQPLSLR |
| | | PEACRPAAGGAVHT |
| | | RGLDFACDIYIWAPLAGTCGVLLLSLVITLYCKRGRKKLLYIFKQPF |
| | | MRPVQTTQEEDGC |
| | | SCRFPEEEEGGCELRVKFSRSADAPAYKQGQNQLYNELNLGRREEY |
| | | DVLDKRRGRDPEMG |
| | | GKPRRKNPQEGLYNELQKDKMAEAYSEIGMKGERRRGKGHDGLY |
| | | QGLSTATKDTYDALHM |
| | | QALPPR |
| hzCAR123-8 | 191 | MALPVTALLLPLALLLHAARPDVVMTQSPDSLAVSLGERATINCRA |
| scFv | | SKSISKDLAWYQQK |
| | | PGQPPKLLIYSGSTLQSGVPDRFSGSGSGTDFTLTISSLQAEDVAVYY |
| | | CQQHNKYPYTFG |
| | | GGTKVEIKGGGGSGGGGSGGGGSGGGGSQVQLVQSGAEVKKPGAS |
| | | VKVSCKASGYTFTSY |
| | | WMNWVRQAPGQGLEWMGRIDPYDSETHYNQKFKDRVTMTVDKS |
| | | TSTAYMELSSLRSEDTA |
| | | VYYCARGNWDDYWGQGTTVTVSS |
| hzCAR123- | 250 | QVQLVQSGAEVKKPGASVKVSCKASGYTFTSYWMNWVRQAPGQG |
| 8 VH | | LEWMGRIDPYDSETHYNQKFKDRVTMTVDKSTSTAYMELSSLRSE |
| | | DTAVYYCARGNWDDYWGQGTTVTVSS |
| hzCAR123- | 309 | DVVMTQSPDSLAVSLGERATINCRASKSISKDLAWYQQKPGQPPKL |
| 8 VL | | LIYSGSTLQSGVPDRFSGSGSGTDFTLTISSLQAEDVAVYYCQQHNK |
| | | YPYTFGGGTKVEIK |
| hzCAR123- | 74 | ATGGCCCTCCCTGTCACCGCCCTGCTGCTTCCGCTGGCTCTTCTG |
| 9 NT | | CTCCACGCCGCTCGGCCCCAAGTGCAGCTGGTGCAGTCAGGCAG |
| | | CGAACTGAAGAAGCCCGGAGCCTCCGTCAAAGTGTCCTGCAAAG |
| | | CCTCGGGATACACCTTCACCTCCTACTGGATGAACTGGGTCCGCC |
| | | AGGCACCTGGACAGGGGCTGGAGTGGATGGGAAGGATCGATCC |
| | | CTACGATTCCGAAACCCATTACAATCAGAAGTTCAAGGACCGGT |
| | | TTGTGTTCTCCGTGGACAAGTCCGTGTCCACCGCCTACCTCCAAA |
| | | TTAGCAGCCTGAAGGCGGAGGATACAGCTGTCTACTACTGCGCT |
| | | CGCGGAAACTGGGATGACTATTGGGGCCAGGGAACTACCGTGAC |
| | | TGTGTCCTCCGGGGGTGGCGGTAGCGGAGGAGGGGGCTCCGGCG |
| | | GCGGCGGCTCAGGGGGCGGAGGAAGCGACGTGCAGCTCACCCA |
| | | GTCGCCCTCATTTCTGTCGGCCTCAGTGGGAGACAGAGTGACCAT |
| | | TACTTGTCGGGCCTCCAAGAGCATCTCCAAGGACCTGGCCTGGT |
| | | ATCAGCAGAAGCCAGGAAAGGCGCCTAAGTTGCTCATCTACTCG |
| | | GGGTCGACCCTGCAATCTGGCGTGCCGTCCCGGTTCTCCGGTTCG |
| | | GGAAGCGGTACCGAATTCACCCTTACTATCTCCTCCCTGCAACCG |
| | | GAGGACTTCGCCACCTACTACTGCCAACAGCACAACAAGTACCC |
| | | GTACACTTTCGGGGGTGGCACGAAGGTCGAAATCAAGACCACTA |
| | | CCCCAGCACCGAGGCCACCCACCCCGGCTCCTACCATCGCCTCCC |
| | | AGCCTCTGTCCCTGCGTCCGGAggcatgtagacccgcagctggtggggccgtgcata |
| | | cccggggtcttgacttcgcctgcgatatctacatttgggcccctctggctggtacttgcggggtcctgctgcttt |
| | | cactcgtgatcactctttactgtaagcgcggtcggaagaagctgctgtacatctttaagcaacccttcatgagg |
| | | cctgtgcagactactcaagaggaggacggctgttcatgccggttcccagaggaggaggaaggcggctgc |
| | | gaactgcgcgtgaaattcagccgcagcgcagatgctccagcctacaagcaggggcagaaccagctctac |
| | | aacgaactcaatcttggtcggagagaggagtacgacgtgctggacaagcggagaggacgggacccaga |
| | | aatgggcgggaagccgcgcagaaagaatccccaagagggcctgtacaacgagctccaaaaggataaga |
| | | tggcagaagcctatagcgagattggtatgaaaggggaacgcagaagaggcaaaggccacgacggactgt |
| | | accagggactcagcaccgccaccaaggacacctatgacgctcttcacatgcaggccctgccgcctcgg |
| hzCAR123- | 133 | MALPVTALLLPLALLLHAARPQVQLVQSGSELKKPGASVKVSCKAS |
| 9 AA | | GYTFTSYWMNWVRQ |
| | | APGQGLEWMGRIDPYDSETHYNQKFKDRFVFSVDKSVSTAYLQISS |
| | | LKAEDTAVYYCARG |
| | | NWDDYWGQGTTVTVSSGGGGSGGGGSGGGGSGGGGSDVQLTQSP |
| | | SFLSASVGDRVTITCR |
| | | ASKSISKDLAWYQQKPGKAPKLLIYSGSTLQSGVPSRFSGSGSGTEF |
| | | TLTISSLQPEDFA |
| | | TYYCQQHNKYPYTFGGGTKVEIKTTTPAPRPPTPAPTIASQPLSLRPE |
| | | ACRPAAGGAVHT |
| | | RGLDFACDIYIWAPLAGTCGVLLLSLVITLYCKRGRKKLLYIFKQPF |
| | | MRPVQTTQEEDGC |
| | | SCRFPEEEEGGCELRVKFSRSADAPAYKQGQNQLYNELNLGRREEY |
| | | DVLDKRRGRDPEMG |
| | | GKPRRKNPQEGLYNELQKDKMAEAYSEIGMKGERRRGKGHDGLY |
| | | QGLSTATKDTYDALHM |
| | | QALPPR |
| hzCAR123-9 | 192 | MALPVTALLLPLALLLHAARPQVQLVQSGSELKKPGASVKVSCKAS |
| scFv | | GYTFTSYWMNWVRQ |
| | | APGQGLEWMGRIDPYDSETHYNQKFKDRFVFSVDKSVSTAYLQISS |
| | | LKAEDTAVYYCARG |
| | | NWDDYWGQGTTVTVSSGGGGSGGGGSGGGGSGGGGSDVQLTQSP |
| | | SFLSASVGDRVTITCR |
| | | ASKSISKDLAWYQQKPGKAPKLLIYSGSTLQSGVPSRFSGSGSGTEF |
| | | TLTISSLQPEDFA |
| | | TYYCQQHNKYPYTFGGGTKVEIK |
| hzCAR123- | 251 | QVQLVQSGSELKKPGASVKVSCKASGYTFTSYWMNWVRQAPGQG |
| 9 VH | | LEWMGRIDPYDSETHYNQKFKDRFVFSVDKSVSTAYLQISSLKAED |
| | | TAVYYCARGNWDDYWGQGTTVTVSS |
| hzCAR123- | 310 | DVQLTQSPSFLSASVGDRVTITCRASKSISKDLAWYQQKPGKAPKLL |
| 10 VL | | IYSGSTLQSGVPSRFSGSGSGTEFTLTISSLQPEDFATYYCQQHNKYP |
| | | YTFGGGTKVEIK |
| hzCAR123- | 75 | ATGGCCCTCCCTGTCACCGCCCTGCTGCTTCCGCTGGCTCTTCTG |
| 10 NT | | CTCCACGCCGCTCGGCCCCAAGTGCAGCTGGTGCAGTCAGGCAG |
| | | CGAACTGAAGAAGCCCGGAGCCTCCGTCAAAGTGTCCTGCAAAG |
| | | CCTCGGGATACACCTTCACCTCCTACTGGATGAACTGGGTCCGCC |
| | | AGGCACCTGGACAGGGGCTGGAGTGGATGGGAAGGATCGATCC |
| | | CTACGATTCCGAAACCCATTACAATCAGAAGTTCAAGGACCGGT |
| | | TTGTGTTCTCCGTGGACAAGTCCGTGTCCACCGCCTACCTCCAAA |
| | | TTAGCAGCCTGAAGGCGGAGGATACAGCTGTCTACTACTGCGCT |
| | | CGCGGAAACTGGGATGACTATTGGGGCCAGGGAACTACCGTGAC |
| | | TGTGTCCTCCGGGGGTGGCGGTAGCGGAGGAGGGGGCTCCGGCG |
| | | GCGGCGGCTCAGGGGGCGGAGGAAGCGAAGTGGTGCTGACCCA |
| | | GTCGCCCGCAACCCTCTCTCTGTCGCCGGGAGAACGCGCCACTCT |
| | | TTCCTGTCGGGCGTCCAAGAGCATCTCAAAGGACCTCGCCTGGT |
| | | ACCAGCAGAAGCCTGGTCAAGCCCCGCGGCTGCTGATCTACTCC |
| | | GGCTCCACGCTGCAATCAGGAATCCCAGCCAGATTTTCCGGTTCG |
| | | GGGTCGGGGACTGACTTCACCTTGACCATTAGCTCGCTGGAACCT |
| | | GAGGACTTCGCCGTGTATTACTGCCAGCAGCACAACAAGTACCC |
| | | GTACACCTTCGGAGGCGGTACTAAGGTCGAGATCAAGACCACTA |
| | | CCCCAGCACCGAGGCCACCCACCCCGGCTCCTACCATCGCCTCCC |
| | | AGCCTCTGTCCCTGCGTCCGGAggcatgtagacccgcagctggtggggccgtgcata |
| | | cccggggtcttgacttcgcctgcgatatctacatttgggcccctctggctggtacttgcggggtcctgctgcttt |
| | | cactcgtgatcactctttactgtaagcgcggtcggaagaagctgctgtacatctttaagcaacccttcatgagg |
| | | cctgtgcagactactcaagaggaggacggctgttcatgccggttcccagaggaggaggaaggcggctgc |
| | | gaactgcgcgtgaaattcagccgcagcgcagatgctccagcctacaagcaggggcagaaccagctctac |
| | | aacgaactcaatcttggtcggagagaggagtacgacgtgctggacaagcggagaggacgggacccaga |
| | | aatgggcgggaagccgcgcagaaagaatccccaagagggcctgtacaacgagctccaaaaggataaga |
| | | tggcagaagcctatagcgagattggtatgaaaggggaacgcagaagaggcaaaggccacgacggactgt |
| | | accagggactcagcaccgccaccaaggacacctatgacgctcttcacatgcaggccctgccgcctcgg |
| hzCAR123- | 134 | MALPVTALLLPLALLLHAARPQVQLVQSGSELKKPGASVKVSCKAS |
| 10 AA | | GYTFTSYWMNWVRQ |
| | | APGQGLEWMGRIDPYDSETHYNQKFKDRFVFSVDKSVSTAYLQISS |
| | | LKAEDTAVYYCARG |
| | | NWDDYWGQGTTVTVSSGGGGSGGGGSGGGGSGGGGSEVVLTQSP |
| | | ATLSLSPGERATLSCR |
| | | ASKSISKDLAWYQQKPGQAPRLLIYSGSTLQSGIPARFSGSGSGTDFT |
| | | LTISSLEPEDFA |
| | | VYYCQQHNKYPYTFGGGTKVEIKTTTPAPRPPTPAPTIASQPLSLRPE |
| | | ACRPAAGGAVHT |
| | | RGLDFACDIYIWAPLAGTCGVLLLSLVITLYCKRGRKKLLYIFKQPF |
| | | MRPVQTTQEEDGC |
| | | SCRFPEEEEGGCELRVKFSRSADAPAYKQGQNQLYNELNLGRREEY |
| | | DVLDKRRGRDPEMG |
| | | GKPRRKNPQEGLYNELQKDKMAEAYSEIGMKGERRRGKGHDGLY |
| | | QGLSTATKDTYDALHM |
| | | QALPPR |
| hzCAR123- | 193 | MALPVTALLLPLALLLHAARPQVQLVQSGSELKKPGASVKVSCKAS |
| 10 | | GYTFTSYWMNWVRQ |
| scFv | | APGQGLEWMGRIDPYDSETHYNQKFKDRFVFSVDKSVSTAYLQISS |
| | | LKAEDTAVYYCARG |
| | | NWDDYWGQGTTVTVSSGGGGSGGGGSGGGGSGGGGSEVVLTQSP |
| | | ATLSLSPGERATLSCR |
| | | ASKSISKDLAWYQQKPGQAPRLLIYSGSTLQSGIPARFSGSGSGTDFT |
| | | LTISSLEPEDFA |
| | | VYYCQQHNKYPYTFGGGTKVEIK |
| hzCAR123- | 252 | QVQLVQSGSELKKPGASVKVSCKASGYTFTSYWMNWVRQAPGQG |
| 10 VH | | LEWMGRIDPYDSETHYNQKFKDRFVFSVDKSVSTAYLQISSLKAED |
| | | TAVYYCARGNWDDYWGQGTTVTVSS |
| hzCAR123- | 311 | EVVLTQSPATLSLSPGERATLSCRASKSISKDLAWYQQKPGQAPRLL |
| 10 VL | | IYSGSTLQSGIPARFSGSGSGTDFTLTISSLEPEDFAVYYCQQHNKYP |
| | | YTFGGGTKVEIK |
| hzCAR123- | 76 | ATGGCCCTCCCTGTCACCGCCCTGCTGCTTCCGCTGGCTCTTCTG |
| 11 NT | | CTCCACGCCGCTCGGCCCCAAGTGCAGCTGGTGCAGTCAGGCAG |
| | | CGAACTGAAGAAGCCCGGAGCCTCCGTCAAAGTGTCCTGCAAAG |
| | | CCTCGGGATACACCTTCACCTCCTACTGGATGAACTGGGTCCGCC |
| | | AGGCACCTGGACAGGGGCTGGAGTGGATGGGAAGGATCGATCC |
| | | CTACGATTCCGAAACCCATTACAATCAGAAGTTCAAGGACCGGT |
| | | TTGTGTTCTCCGTGGACAAGTCCGTGTCCACCGCCTACCTCCAAA |
| | | TTAGCAGCCTGAAGGCGGAGGATACAGCTGTCTACTACTGCGCT |
| | | CGCGGAAACTGGGATGACTATTGGGGCCAGGGAACTACCGTGAC |
| | | TGTGTCCTCCGGGGGTGGCGGTAGCGGAGGAGGGGGCTCCGGCG |
| | | GCGGCGGCTCAGGGGGCGGAGGAAGCGACGTCGTGATGACCCA |
| | | GTCACCGGCATTCCTGTCCGTGACTCCCGGAGAAAAGGTCACGA |
| | | TTACTTGCCGGGCGTCCAAGAGCATCTCCAAGGACCTCGCCTGGT |
| | | ACCAACAGAAGCCGGACCAGGCCCCTAAGCTGTTGATCTACTCG |
| | | GGGTCCACCCTTCAATCGGGAGTGCCATCGCGGTTTAGCGGTTCG |
| | | GGTTCTGGGACCGACTTCACTTTCACCATCTCCTCACTGGAAGCC |
| | | GAGGATGCCGCCACTTACTACTGTCAGCAGCACAACAAGTATCC |
| | | GTACACCTTCGGAGGCGGTACCAAAGTGGAGATCAAGACCACTA |
| | | CCCCAGCACCGAGGCCACCCACCCCGGCTCCTACCATCGCCTCCC |
| | | AGCCTCTGTCCCTGCGTCCGGAggcatgtagacccgcagctggtggggccgtgcata |
| | | cccggggtcttgacttcgcctgcgatatctacatttgggcccctctggctggtacttgcggggtcctgctgcttt |
| | | cactcgtgatcactctttactgtaagcgcggtcggaagaagctgctgtacatctttaagcaacccttcatgagg |
| | | cctgtgcagactactcaagaggaggacggctgttcatgccggttcccagaggaggaggaaggcggctgc |
| | | gaactgcgcgtgaaattcagccgcagcgcagatgctccagcctacaagcaggggcagaaccagctctac |
| | | aacgaactcaatcttggtcggagagaggagtacgacgtgctggacaagcggagaggacgggacccaga |
| | | aatgggcgggaagccgcgcagaaagaatccccaagagggcctgtacaacgagctccaaaaggataaga |
| | | tggcagaagcctatagcgagattggtatgaaaggggaacgcagaagaggcaaaggccacgacggactgt |
| | | accagggactcagcaccgccaccaaggacacctatgacgctcttcacatgcaggccctgccgcctcgg |
| hzCAR123- | 135 | MALPVTALLLPLALLLHAARPQVQLVQSGSELKKPGASVKVSCKAS |
| 11 AA | | GYTFTSYWMNWVRQ |
| | | APGQGLEWMGRIDPYDSETHYNQKFKDRFVFSVDKSVSTAYLQISS |
| | | LKAEDTAVYYCARG |
| | | NWDDYWGQGTTVTVSSGGGGSGGGGSGGGGSGGGGSDVVMTQS |
| | | PAFLSVTPGEKVTITCR |
| | | ASKSISKDLAWYQQKPDQAPKLLIYSGSTLQSGVPSRFSGSGSGTDF |
| | | TFTISSLEAEDAA |
| | | TYYCQQHNKYPYTFGGGTKVEIKTTTPAPRPPTPAPTIASQPLSLRPE |
| | | ACRPAAGGAVHT |
| | | RGLDFACDIYIWAPLAGTCGVLLLSLVITLYCKRGRKKLLYIFKQPF |
| | | MRPVQTTQEEDGC |
| | | SCRFPEEEEGGCELRVKFSRSADAPAYKQGQNQLYNELNLGRREEY |
| | | DVLDKRRGRDPEMG |
| | | GKPRRKNPQEGLYNELQKDKMAEAYSEIGMKGERRRGKGHDGLY |
| | | QGLSTATKDTYDALHM |
| | | QALPPR |
| hzCAR123- | 194 | MALPVTALLLPLALLLHAARPQVQLVQSGSELKKPGASVKVSCKAS |
| 11 | | GYTFTSYWMNWVRQ |
| scFv | | APGQGLEWMGRIDPYDSETHYNQKFKDRFVFSVDKSVSTAYLQISS |
| | | LKAEDTAVYYCARG |
| | | NWDDYWGQGTTVTVSSGGGGSGGGGSGGGGSGGGGSDVVMTQS |
| | | PAFLSVTPGEKVTITCR |
| | | ASKSISKDLAWYQQKPDQAPKLLIYSGSTLQSGVPSRFSGSGSGTDF |
| | | TFTISSLEAEDAA |
| | | TYYCQQHNKYPYTFGGGTKVEIK |
| hzCAR123- | 253 | QVQLVQSGSELKKPGASVKVSCKASGYTFTSYWMNWVRQAPGQG |
| 11 VH | | LEWMGRIDPYDSETHYNQKFKDRFVFSVDKSVSTAYLQISSLKAED |
| | | TAVYYCARGNWDDYWGQGTTVTVSS |
| hzCAR123- | 312 | DVVMTQSPAFLSVTPGEKVTITCRASKSISKDLAWYQQKPDQAPKL |
| 11 VL | | LIYSGSTLQSGVPSRFSGSGSGTDFTFTISSLEAEDAATYYCQQHNKY |
| | | PYTFGGGTKVEIK |
| hzCAR123- | 77 | ATGGCCCTCCCTGTCACCGCCCTGCTGCTTCCGCTGGCTCTTCTG |
| 12 NT | | CTCCACGCCGCTCGGCCCCAAGTGCAGCTGGTGCAGTCAGGCAG |
| | | CGAACTGAAGAAGCCCGGAGCCTCCGTCAAAGTGTCCTGCAAAG |
| | | CCTCGGGATACACCTTCACCTCCTACTGGATGAACTGGGTCCGCC |
| | | AGGCACCTGGACAGGGGCTGGAGTGGATGGGAAGGATCGATCC |
| | | CTACGATTCCGAAACCCATTACAATCAGAAGTTCAAGGACCGGT |
| | | TTGTGTTCTCCGTGGACAAGTCCGTGTCCACCGCCTACCTCCAAA |
| | | TTAGCAGCCTGAAGGCGGAGGATACAGCTGTCTACTACTGCGCT |
| | | CGCGGAAACTGGGATGACTATTGGGGCCAGGGAACTACCGTGAC |
| | | TGTGTCCTCCGGGGGTGGCGGTAGCGGAGGAGGGGGCTCCGGCG |
| | | GCGGCGGCTCAGGGGGCGGAGGAAGCGACGTGGTCATGACTCA |
| | | GTCCCCGGACTCACTCGCGGTGTCGCTTGGAGAGAGAGCGACCA |
| | | TCAACTGTCGGGCCTCAAAGAGCATCAGCAAGGACCTGGCCTGG |
| | | TACCAGCAGAAGCCGGGACAGCCGCCAAAGCTGCTGATCTACTC |
| | | CGGGTCCACCTTGCAATCTGGTGTCCCTGACCGGTTCTCCGGTTC |
| | | CGGGTCGGGTACCGACTTCACGCTCACTATTTCGTCGCTGCAAGC |
| | | CGAAGATGTGGCCGTGTACTATTGCCAACAGCACAACAAGTACC |
| | | CCTACACTTTTGGCGGAGGCACCAAGGTGGAAATCAAGACCACT |
| | | ACCCCAGCACCGAGGCCACCCACCCCGGCTCCTACCATCGCCTC |
| | | CCAGCCTCTGTCCCTGCGTCCGGAggcatgtagacccgcagctggtggggccgtgc |
| | | atacccggggtcttgacttcgcctgcgatatctacatttgggcccctctggctggtacttgcggggtcctgctg |
| | | ctttcactcgtgatcactctttactgtaagcgcggtcggaagaagctgctgtacatctttaagcaacccttcatg |
| | | aggcctgtgcagactactcaagaggaggacggctgttcatgccggttcccagaggaggaggaaggcggc |
| | | tgcgaactgcgcgtgaaattcagccgcagcgcagatgctccagcctacaagcaggggcagaaccagctct |
| | | acaacgaactcaatcttggtcggagagaggagtacgacgtgctggacaagcggagaggacgggaccca |
| | | gaaatgggcgggaagccgcgcagaaagaatccccaagagggcctgtacaacgagctccaaaaggataa |
| | | gatggcagaagcctatagcgagattggtatgaaaggggaacgcagaagaggcaaaggccacgacggac |
| | | tgtaccagggactcagcaccgccaccaaggacacctatgacgctcttcacatgcaggccctgccgcctcgg |
| hzCAR123- | 136 | MALPVTALLLPLALLLHAARPQVQLVQSGSELKKPGASVKVSCKAS |
| 12 AA | | GYTFTSYWMNWVRQ |
| | | APGQGLEWMGRIDPYDSETHYNQKFKDRFVFSVDKSVSTAYLQISS |
| | | LKAEDTAVYYCARG |
| | | NWDDYWGQGTTVTVSSGGGGSGGGGSGGGGSGGGGSDVVMTQS |
| | | PDSLAVSLGERATINCR |
| | | ASKSISKDLAWYQQKPGQPPKLLIYSGSTLQSGVPDRFSGSGSGTDF |
| | | TLTISSLQAEDVA |
| | | VYYCQQHNKYPYTFGGGTKVEIKTTTPAPRPPTPAPTIASQPLSLRPE |
| | | ACRPAAGGAVHT |
| | | RGLDFACDIYIWAPLAGTCGVLLLSLVITLYCKRGRKKLLYIFKQPF |
| | | MRPVQTTQEEDGC |
| | | SCRFPEEEEGGCELRVKFSRSADAPAYKQGQNQLYNELNLGRREEY |
| | | DVLDKRRGRDPEMG |
| | | GKPRRKNPQEGLYNELQKDKMAEAYSEIGMKGERRRGKGHDGLY |
| | | QGLSTATKDTYDALHM |
| | | QALPPR |
| hzCAR123- | 195 | MALPVTALLLPLALLLHAARPQVQLVQSGSELKKPGASVKVSCKAS |
| 12 | | GYTFTSYWMNWVRQ |
| scFv | | APGQGLEWMGRIDPYDSETHYNQKFKDRFVFSVDKSVSTAYLQISS |
| | | LKAEDTAVYYCARG |
| | | NWDDYWGQGTTVTVSSGGGGSGGGGSGGGGSGGGGSDVVMTQS |
| | | PDSLAVSLGERATINCR |
| | | ASKSISKDLAWYQQKPGQPPKLLIYSGSTLQSGVPDRFSGSGSGTDF |
| | | TLTISSLQAEDVA |
| | | VYYCQQHNKYPYTFGGGTKVEIK |
| hzCAR123- | 254 | QVQLVQSGSELKKPGASVKVSCKASGYTFTSYWMNWVRQAPGQG |
| 12 VH | | LEWMGRIDPYDSETHYNQKFKDRFVFSVDKSVSTAYLQISSLKAED |
| | | TAVYYCARGNWDDYWGQGTTVTVSS |
| hzCAR123- | 313 | DVVMTQSPDSLAVSLGERATINCRASKSISKDLAWYQQKPGQPPKL |
| 12 VL | | LIYSGSTLQSGVPDRFSGSGSGTDFTLTISSLQAEDVAVYYCQQHNK |
| | | YPYTFGGGTKVEIK |
| hzCAR123- | 78 | ATGGCCCTCCCTGTCACCGCCCTGCTGCTTCCGCTGGCTCTTCTG |
| 13 NT | | CTCCACGCCGCTCGGCCCGACGTGCAGCTCACCCAGTCGCCCTCA |
| | | TTTCTGTCGGCCTCAGTGGGAGACAGAGTGACCATTACTTGTCGG |
| | | GCCTCCAAGAGCATCTCCAAGGACCTGGCCTGGTATCAGCAGAA |
| | | GCCAGGAAAGGCGCCTAAGTTGCTCATCTACTCGGGGTCGACCC |
| | | TGCAATCTGGCGTGCCGTCCCGGTTCTCCGGTTCGGGAAGCGGTA |
| | | CCGAATTCACCCTTACTATCTCCTCCCTGCAACCGGAGGACTTCG |
| | | CCACCTACTACTGCCAACAGCACAACAAGTACCCGTACACTTTC |
| | | GGGGGTGGCACGAAGGTCGAAATCAAGGGGGGTGGCGGTAGCG |
| | | GAGGAGGGGGCTCCGGCGGCGGCGGCTCAGGGGGCGGAGGAAG |
| | | CCAAGTGCAGCTGGTGCAGTCAGGCAGCGAACTGAAGAAGCCCG |
| | | GAGCCTCCGTCAAAGTGTCCTGCAAAGCCTCGGGATACACCTTC |
| | | ACCTCCTACTGGATGAACTGGGTCCGCCAGGCACCTGGACAGGG |
| | | GCTGGAGTGGATGGGAAGGATCGATCCCTACGATTCCGAAACCC |
| | | ATTACAATCAGAAGTTCAAGGACCGGTTTGTGTTCTCCGTGGACA |
| | | AGTCCGTGTCCACCGCCTACCTCCAAATTAGCAGCCTGAAGGCG |
| | | GAGGATACAGCTGTCTACTACTGCGCTCGCGGAAACTGGGATGA |
| | | CTATTGGGGCCAGGGAACTACCGTGACTGTGTCCTCCACCACTAC |
| | | CCCAGCACCGAGGCCACCCACCCCGGCTCCTACCATCGCCTCCC |
| | | AGCCTCTGTCCCTGCGTCCGGAggcatgtagacccgcagctggtggggccgtgcata |
| | | cccggggtcttgacttcgcctgcgatatctacatttgggcccctctggctggtacttgcggggtcctgctgcttt |
| | | cactcgtgatcactctttactgtaagcgcggtcggaagaagctgctgtacatctttaagcaacccttcatgagg |
| | | cctgtgcagactactcaagaggaggacggctgttcatgccggttcccagaggaggaggaaggcggctgc |
| | | gaactgcgcgtgaaattcagccgcagcgcagatgctccagcctacaagcaggggcagaaccagctctac |
| | | aacgaactcaatcttggtcggagagaggagtacgacgtgctggacaagcggagaggacgggacccaga |
| | | aatgggcgggaagccgcgcagaaagaatccccaagagggcctgtacaacgagctccaaaaggataaga |
| | | tggcagaagcctatagcgagattggtatgaaaggggaacgcagaagaggcaaaggccacgacggactgt |
| | | accagggactcagcaccgccaccaaggacacctatgacgctcttcacatgcaggccctgccgcctcgg |
| hzCAR123- | 137 | MALPVTALLLPLALLLHAARPDVQLTQSPSFLSASVGDRVTITCRAS |
| 13 AA | | KSISKDLAWYQQK |
| | | PGKAPKLLIYSGSTLQSGVPSRFSGSGSGTEFTLTISSLQPEDFATYYC |
| | | QQHNKYPYTFG |
| | | GGTKVEIKGGGGSGGGGSGGGGSGGGGSQVQLVQSGSELKKPGAS |
| | | VKVSCKASGYTFTSY |
| | | WMNWVRQAPGQGLEWMGRIDPYDSETHYNQKFKDRFVFSVDKSV |
| | | STAYLQISSLKAEDTA |
| | | VYYCARGNWDDYWGQGTTVTVSSTTTPAPRPPTPAPTIASQPLSLR |
| | | PEACRPAAGGAVHT |
| | | RGLDFACDIYIWAPLAGTCGVLLLSLVITLYCKRGRKKLLYIFKQPF |
| | | MRPVQTTQEEDGC |
| | | SCRFPEEEEGGCELRVKFSRSADAPAYKQGQNQLYNELNLGRREEY |
| | | DVLDKRRGRDPEMG |
| | | GKPRRKNPQEGLYNELQKDKMAEAYSEIGMKGERRRGKGHDGLY |
| | | QGLSTATKDTYDALHM |
| | | QALPPR |
| hzCAR123- | 196 | MALPVTALLLPLALLLHAARPDVQLTQSPSFLSASVGDRVTITCRAS |
| 13 | | KSISKDLAWYQQK |
| scFv | | PGKAPKLLIYSGSTLQSGVPSRFSGSGSGTEFTLTISSLQPEDFATYYC |
| | | QQHNKYPYTFG |
| | | GGTKVEIKGGGGSGGGGSGGGGSGGGGSQVQLVQSGSELKKPGAS |
| | | VKVSCKASGYTFTSY |
| | | WMNWVRQAPGQGLEWMGRIDPYDSETHYNQKFKDRFVFSVDKSV |
| | | STAYLQISSLKAEDTA |
| | | VYYCARGNWDDYWGQGTTVTVSS |
| hzCAR123- | 255 | QVQLVQSGSELKKPGASVKVSCKASGYTFTSYWMNWVRQAPGQG |
| 13 VH | | LEWMGRIDPYDSETHYNQKFKDRFVFSVDKSVSTAYLQISSLKAED |
| | | TAVYYCARGNWDDYWGQGTTVTVSS |
| hzCAR123- | 314 | DVQLTQSPSFLSASVGDRVTITCRASKSISKDLAWYQQKPGKAPKLL |
| 13 VL | | IYSGSTLQSGVPSRFSGSGSGTEFTLTISSLQPEDFATYYCQQHNKYP |
| | | YTFGGGTKVEIK |
| hzCAR123- | 79 | ATGGCCCTCCCTGTCACCGCCCTGCTGCTTCCGCTGGCTCTTCTG |
| 14 NT | | CTCCACGCCGCTCGGCCCGAAGTGGTGCTGACCCAGTCGCCCGC |
| | | AACCCTCTCTCTGTCGCCGGGAGAACGCGCCACTCTTTCCTGTCG |
| | | GGCGTCCAAGAGCATCTCAAAGGACCTCGCCTGGTACCAGCAGA |
| | | AGCCTGGTCAAGCCCCGCGGCTGCTGATCTACTCCGGCTCCACGC |
| | | TGCAATCAGGAATCCCAGCCAGATTTTCCGGTTCGGGGTCGGGG |
| | | ACTGACTTCACCTTGACCATTAGCTCGCTGGAACCTGAGGACTTC |
| | | GCCGTGTATTACTGCCAGCAGCACAACAAGTACCCGTACACCTT |
| | | CGGAGGCGGTACTAAGGTCGAGATCAAGGGGGGTGGCGGTAGC |
| | | GGAGGAGGGGGCTCCGGCGGCGGCGGCTCAGGGGGCGGAGGAA |
| | | GCCAAGTGCAGCTGGTGCAGTCAGGCAGCGAACTGAAGAAGCCC |
| | | GGAGCCTCCGTCAAAGTGTCCTGCAAAGCCTCGGGATACACCTT |
| | | CACCTCCTACTGGATGAACTGGGTCCGCCAGGCACCTGGACAGG |
| | | GGCTGGAGTGGATGGGAAGGATCGATCCCTACGATTCCGAAACC |
| | | CATTACAATCAGAAGTTCAAGGACCGGTTTGTGTTCTCCGTGGAC |
| | | AAGTCCGTGTCCACCGCCTACCTCCAAATTAGCAGCCTGAAGGC |
| | | GGAGGATACAGCTGTCTACTACTGCGCTCGCGGAAACTGGGATG |
| | | ACTATTGGGGCCAGGGAACTACCGTGACTGTGTCCTCCACCACT |
| | | ACCCCAGCACCGAGGCCACCCACCCCGGCTCCTACCATCGCCTC |
| | | CCAGCCTCTGTCCCTGCGTCCGGAggcatgtagacccgcagctggtggggccgtgc |
| | | atacccggggtcttgacttcgcctgcgatatctacatttgggcccctctggctggtacttgcggggtcctgctg |
| | | ctttcactcgtgatcactctttactgtaagcgcggtcggaagaagctgctgtacatctttaagcaacccttcatg |
| | | aggcctgtgcagactactcaagaggaggacggctgttcatgccggttcccagaggaggaggaaggcggc |
| | | tgcgaactgcgcgtgaaattcagccgcagcgcagatgctccagcctacaagcaggggcagaaccagctct |
| | | acaacgaactcaatcttggtcggagagaggagtacgacgtgctggacaagcggagaggacgggaccca |
| | | gaaatgggcgggaagccgcgcagaaagaatccccaagagggcctgtacaacgagctccaaaaggataa |
| | | gatggcagaagcctatagcgagattggtatgaaaggggaacgcagaagaggcaaaggccacgacggac |
| | | tgtaccagggactcagcaccgccaccaaggacacctatgacgctcttcacatgcaggccctgccgcctcgg |
| hzCAR123- | 138 | MALPVTALLLPLALLLHAARPEVVLTQSPATLSLSPGERATLSCRAS |
| 14 AA | | KSISKDLAWYQQK |
| | | PGQAPRLLIYSGSTLQSGIPARFSGSGSGTDFTLTISSLEPEDFAVYYC |
| | | QQHNKYPYTFG |
| | | GGTKVEIKGGGGSGGGGSGGGGSGGGGSQVQLVQSGSELKKPGAS |
| | | VKVSCKASGYTFTSY |
| | | WMNWVRQAPGQGLEWMGRIDPYDSETHYNQKFKDRFVFSVDKSV |
| | | STAYLQISSLKAEDTA |
| | | VYYCARGNWDDYWGQGTTVTVSSTTTPAPRPPTPAPTIASQPLSLR |
| | | PEACRPAAGGAVHT |
| | | RGLDFACDIYIWAPLAGTCGVLLLSLVITLYCKRGRKKLLYIFKQPF |
| | | MRPVQTTQEEDGC |
| | | SCRFPEEEEGGCELRVKFSRSADAPAYKQGQNQLYNELNLGRREEY |
| | | DVLDKRRGRDPEMG |
| | | GKPRRKNPQEGLYNELQKDKMAEAYSEIGMKGERRRGKGHDGLY |
| | | QGLSTATKDTYDALHM |
| | | QALPPR |
| hzCAR123- | 197 | MALPVTALLLPLALLLHAARPEVVLTQSPATLSLSPGERATLSCRAS |
| 14 | | KSISKDLAWYQQK |
| scFv | | PGQAPRLLIYSGSTLQSGIPARFSGSGSGTDFTLTISSLEPEDFAVYYC |
| | | QQHNKYPYTFG |
| | | GGTKVEIKGGGGSGGGGSGGGGSGGGGSQVQLVQSGSELKKPGAS |
| | | VKVSCKASGYTFTSY |
| | | WMNWVRQAPGQGLEWMGRIDPYDSETHYNQKFKDRFVFSVDKSV |
| | | STAYLQISSLKAEDTA |
| | | VYYCARGNWDDYWGQGTTVTVSS |
| hzCAR123- | 256 | QVQLVQSGSELKKPGASVKVSCKASGYTFTSYWMNWVRQAPGQG |
| 14 VH | | LEWMGRIDPYDSETHYNQKFKDRFVFSVDKSVSTAYLQISSLKAED |
| | | TAVYYCARGNWDDYWGQGTTVTVSS |
| hzCAR123- | 315 | EVVLTQSPATLSLSPGERATLSCRASKSISKDLAWYQQKPGQAPRLL |
| 14 VL | | IYSGSTLQSGIPARFSGSGSGTDFTLTISSLEPEDFAVYYCQQHNKYP |
| | | YTFGGGTKVEIK |
| hzCAR123- | 80 | ATGGCCCTCCCTGTCACCGCCCTGCTGCTTCCGCTGGCTCTTCTG |
| 15 NT | | CTCCACGCCGCTCGGCCCGACGTCGTGATGACCCAGTCACCGGC |
| | | ATTCCTGTCCGTGACTCCCGGAGAAAAGGTCACGATTACTTGCCG |
| | | GGCGTCCAAGAGCATCTCCAAGGACCTCGCCTGGTACCAACAGA |
| | | AGCCGGACCAGGCCCCTAAGCTGTTGATCTACTCGGGGTCCACC |
| | | CTTCAATCGGGAGTGCCATCGCGGTTTAGCGGTTCGGGTTCTGGG |
| | | ACCGACTTCACTTTCACCATCTCCTCACTGGAAGCCGAGGATGCC |
| | | GCCACTTACTACTGTCAGCAGCACAACAAGTATCCGTACACCTTC |
| | | GGAGGCGGTACCAAAGTGGAGATCAAGGGGGGTGGCGGTAGCG |
| | | GAGGAGGGGGCTCCGGCGGCGGCGGCTCAGGGGGCGGAGGAAG |
| | | CCAAGTGCAGCTGGTGCAGTCAGGCAGCGAACTGAAGAAGCCCG |
| | | GAGCCTCCGTCAAAGTGTCCTGCAAAGCCTCGGGATACACCTTC |
| | | ACCTCCTACTGGATGAACTGGGTCCGCCAGGCACCTGGACAGGG |
| | | GCTGGAGTGGATGGGAAGGATCGATCCCTACGATTCCGAAACCC |
| | | ATTACAATCAGAAGTTCAAGGACCGGTTTGTGTTCTCCGTGGACA |
| | | AGTCCGTGTCCACCGCCTACCTCCAAATTAGCAGCCTGAAGGCG |
| | | GAGGATACAGCTGTCTACTACTGCGCTCGCGGAAACTGGGATGA |
| | | CTATTGGGGCCAGGGAACTACCGTGACTGTGTCCTCCACCACTAC |
| | | CCCAGCACCGAGGCCACCCACCCCGGCTCCTACCATCGCCTCCC |
| | | AGCCTCTGTCCCTGCGTCCGGAggcatgtagacccgcagctggtggggccgtgcata |
| | | cccggggtcttgacttcgcctgcgatatctacatttgggcccctctggctggtacttgcggggtcctgctgcttt |
| | | cactcgtgatcactctttactgtaagcgcggtcggaagaagctgctgtacatctttaagcaacccttcatgagg |
| | | cctgtgcagactactcaagaggaggacggctgttcatgccggttcccagaggaggaggaaggcggctgc |
| | | gaactgcgcgtgaaattcagccgcagcgcagatgctccagcctacaagcaggggcagaaccagctctac |
| | | aacgaactcaatcttggtcggagagaggagtacgacgtgctggacaagcggagaggacgggacccaga |
| | | aatgggcgggaagccgcgcagaaagaatccccaagagggcctgtacaacgagctccaaaaggataaga |
| | | tggcagaagcctatagcgagattggtatgaaaggggaacgcagaagaggcaaaggccacgacggactgt |
| | | accagggactcagcaccgccaccaaggacacctatgacgctcttcacatgcaggccctgccgcctcgg |
| hzCAR123- | 139 | MALPVTALLLPLALLLHAARPDVVMTQSPAFLSVTPGEKVTITCRAS |
| 15 AA | | KSISKDLAWYQQK |
| | | PDQAPKLLIYSGSTLQSGVPSRFSGSGSGTDFTFTISSLEAEDAATYY |
| | | CQQHNKYPYTFG |
| | | GGTKVEIKGGGGSGGGGSGGGGSGGGGSQVQLVQSGSELKKPGAS |
| | | VKVSCKASGYTFTSY |
| | | WMNWVRQAPGQGLEWMGRIDPYDSETHYNQKFKDRFVFSVDKSV |
| | | STAYLQISSLKAEDTA |
| | | VYYCARGNWDDYWGQGTTVTVSSTTTPAPRPPTPAPTIASQPLSLR |
| | | PEACRPAAGGAVHT |
| | | RGLDFACDIYIWAPLAGTCGVLLLSLVITLYCKRGRKKLLYIFKQPF |
| | | MRPVQTTQEEDGC |
| | | SCRFPEEEEGGCELRVKFSRSADAPAYKQGQNQLYNELNLGRREEY |
| | | DVLDKRRGRDPEMG |
| | | GKPRRKNPQEGLYNELQKDKMAEAYSEIGMKGERRRGKGHDGLY |
| | | QGLSTATKDTYDALHM |
| | | QALPPR |
| hzCAR123- | 198 | MALPVTALLLPLALLLHAARPDVVMTQSPAFLSVTPGEKVTITCRAS |
| 15 | | KSISKDLAWYQQK |
| scFv | | PDQAPKLLIYSGSTLQSGVPSRFSGSGSGTDFTFTISSLEAEDAATYY |
| | | CQQHNKYPYTFG |
| | | GGTKVEIKGGGGSGGGGSGGGGSGGGGSQVQLVQSGSELKKPGAS |
| | | VKVSCKASGYTFTSY |
| | | WMNWVRQAPGQGLEWMGRIDPYDSETHYNQKFKDRFVFSVDKSV |
| | | STAYLQISSLKAEDTA |
| | | VYYCARGNWDDYWGQGTTVTVSS |
| hzCAR123- | 257 | QVQLVQSGSELKKPGASVKVSCKASGYTFTSYWMNWVRQAPGQG |
| 15 VH | | LEWMGRIDPYDSETHYNQKFKDRFVFSVDKSVSTAYLQISSLKAED |
| | | TAVYYCARGNWDDYWGQGTTVTVSS |
| hzCAR123- | 316 | DVVMTQSPAFLSVTPGEKVTITCRASKSISKDLAWYQQKPDQAPKL |
| 15 VL | | LIYSGSTLQSGVPSRFSGSGSGTDFTFTISSLEAEDAATYYCQQHNKY |
| | | PYTFGGGTKVEIK |
| hzCAR123- | 81 | ATGGCCCTCCCTGTCACCGCCCTGCTGCTTCCGCTGGCTCTTCTG |
| 16 NT | | CTCCACGCCGCTCGGCCCGACGTGGTCATGACTCAGTCCCCGGA |
| | | CTCACTCGCGGTGTCGCTTGGAGAGAGAGCGACCATCAACTGTC |
| | | GGGCCTCAAAGAGCATCAGCAAGGACCTGGCCTGGTACCAGCAG |
| | | AAGCCGGGACAGCCGCCAAAGCTGCTGATCTACTCCGGGTCCAC |
| | | CTTGCAATCTGGTGTCCCTGACCGGTTCTCCGGTTCCGGGTCGGG |
| | | TACCGACTTCACGCTCACTATTTCGTCGCTGCAAGCCGAAGATGT |
| | | GGCCGTGTACTATTGCCAACAGCACAACAAGTACCCCTACACTTT |
| | | TGGCGGAGGCACCAAGGTGGAAATCAAGGGGGGTGGCGGTAGC |
| | | GGAGGAGGGGGCTCCGGCGGCGGCGGCTCAGGGGGCGGAGGAA |
| | | GCCAAGTGCAGCTGGTGCAGTCAGGCAGCGAACTGAAGAAGCCC |
| | | GGAGCCTCCGTCAAAGTGTCCTGCAAAGCCTCGGGATACACCTT |
| | | CACCTCCTACTGGATGAACTGGGTCCGCCAGGCACCTGGACAGG |
| | | GGCTGGAGTGGATGGGAAGGATCGATCCCTACGATTCCGAAACC |
| | | CATTACAATCAGAAGTTCAAGGACCGGTTTGTGTTCTCCGTGGAC |
| | | AAGTCCGTGTCCACCGCCTACCTCCAAATTAGCAGCCTGAAGGC |
| | | GGAGGATACAGCTGTCTACTACTGCGCTCGCGGAAACTGGGATG |
| | | ACTATTGGGGCCAGGGAACTACCGTGACTGTGTCCTCCACCACT |
| | | ACCCCAGCACCGAGGCCACCCACCCCGGCTCCTACCATCGCCTC |
| | | CCAGCCTCTGTCCCTGCGTCCGGAggcatgtagacccgcagctggtggggccgtgc |
| | | atacccggggtcttgacttcgcctgcgatatctacatttgggcccctctggctggtacttgcggggtcctgctg |
| | | ctttcactcgtgatcactctttactgtaagcgcggtcggaagaagctgctgtacatctttaagcaacccttcatg |
| | | aggcctgtgcagactactcaagaggaggacggctgttcatgccggttcccagaggaggaggaaggcggc |
| | | tgcgaactgcgcgtgaaattcagccgcagcgcagatgctccagcctacaagcaggggcagaaccagctct |
| | | acaacgaactcaatcttggtcggagagaggagtacgacgtgctggacaagcggagaggacgggaccca |
| | | gaaatgggcgggaagccgcgcagaaagaatccccaagagggcctgtacaacgagctccaaaaggataa |
| | | gatggcagaagcctatagcgagattggtatgaaaggggaacgcagaagaggcaaaggccacgacggac |
| | | tgtaccagggactcagcaccgccaccaaggacacctatgacgctcttcacatgcaggccctgccgcctcgg |
| hzCAR123- | 140 | MALPVTALLLPLALLLHAARPDVVMTQSPDSLAVSLGERATINCRA |
| 16 AA | | SKSISKDLAWYQQK |
| | | PGQPPKLLIYSGSTLQSGVPDRFSGSGSGTDFTLTISSLQAEDVAVYY |
| | | CQQHNKYPYTFG |
| | | GGTKVEIKGGGGSGGGGSGGGGSGGGGSQVQLVQSGSELKKPGAS |
| | | VKVSCKASGYTFTSY |
| | | WMNWVRQAPGQGLEWMGRIDPYDSETHYNQKFKDRFVFSVDKSV |
| | | STAYLQISSLKAEDTA |
| | | VYYCARGNWDDYWGQGTTVTVSSTTTPAPRPPTPAPTIASQPLSLR |
| | | PEACRPAAGGAVHT |
| | | RGLDFACDIYIWAPLAGTCGVLLLSLVITLYCKRGRKKLLYIFKQPF |
| | | MRPVQTTQEEDGC |
| | | SCRFPEEEEGGCELRVKFSRSADAPAYKQGQNQLYNELNLGRREEY |
| | | DVLDKRRGRDPEMG |
| | | GKPRRKNPQEGLYNELQKDKMAEAYSEIGMKGERRRGKGHDGLY |
| | | QGLSTATKDTYDALHM |
| | | QALPPR |
| hzCAR123- | 199 | MALPVTALLLPLALLLHAARPDVVMTQSPDSLAVSLGERATINCRA |
| 16 | | SKSISKDLAWYQQK |
| scFv | | PGQPPKLLIYSGSTLQSGVPDRFSGSGSGTDFTLTISSLQAEDVAVYY |
| | | CQQHNKYPYTFG |
| | | GGTKVEIKGGGGSGGGGSGGGGSGGGGSQVQLVQSGSELKKPGAS |
| | | VKVSCKASGYTFTSY |
| | | WMNWVRQAPGQGLEWMGRIDPYDSETHYNQKFKDRFVFSVDKSV |
| | | STAYLQISSLKAEDTA |
| | | VYYCARGNWDDYWGQGTTVTVSS |
| hzCAR123- | 258 | QVQLVQSGSELKKPGASVKVSCKASGYTFTSYWMNWVRQAPGQG |
| 16 VH | | LEWMGRIDPYDSETHYNQKFKDRFVFSVDKSVSTAYLQISSLKAED |
| | | TAVYYCARGNWDDYWGQGTTVTVSS |
| hzCAR123- | 317 | DVVMTQSPDSLAVSLGERATINCRASKSISKDLAWYQQKPGQPPKL |
| 16 VL | | LIYSGSTLQSGVPDRFSGSGSGTDFTLTISSLQAEDVAVYYCQQHNK |
| | | YPYTFGGGTKVEIK |
| hzCAR123- | 82 | ATGGCCCTCCCTGTCACCGCCCTGCTGCTTCCGCTGGCTCTTCTG |
| 17 NT | | CTCCACGCCGCTCGGCCCGAGGTGCAGCTGGTGCAGAGCGGAGC |
| | | CGAGGTCAAGAAGCCTGGAGAATCCCTGAGGATCAGCTGCAAAG |
| | | GCAGCGGGTATACCTTCACCTCCTACTGGATGAATTGGGTCCGCC |
| | | AGATGCCCGGAAAAGGCCTGGAGTGGATGGGACGGATTGACCCC |
| | | TACGACTCGGAAACCCATTACAACCAGAAGTTCAAGGATCACGT |
| | | GACCATCTCCGTGGACAAGTCCATTTCCACTGCGTACCTCCAGTG |
| | | GTCAAGCCTGAAGGCCTCCGACACTGCTATGTACTACTGCGCAC |
| | | GCGGAAACTGGGATGATTACTGGGGACAGGGAACAACCGTGACT |
| | | GTGTCCTCCGGGGGTGGCGGTAGCGGAGGAGGGGGCTCCGGCGG |
| | | CGGCGGCTCAGGGGGCGGAGGAAGCGACGTGCAGCTCACCCAG |
| | | TCGCCCTCATTTCTGTCGGCCTCAGTGGGAGACAGAGTGACCATT |
| | | ACTTGTCGGGCCTCCAAGAGCATCTCCAAGGACCTGGCCTGGTA |
| | | TCAGCAGAAGCCAGGAAAGGCGCCTAAGTTGCTCATCTACTCGG |
| | | GGTCGACCCTGCAATCTGGCGTGCCGTCCCGGTTCTCCGGTTCGG |
| | | GAAGCGGTACCGAATTCACCCTTACTATCTCCTCCCTGCAACCGG |
| | | AGGACTTCGCCACCTACTACTGCCAACAGCACAACAAGTACCCG |
| | | TACACTTTCGGGGGTGGCACGAAGGTCGAAATCAAGACCACTAC |
| | | CCCAGCACCGAGGCCACCCACCCCGGCTCCTACCATCGCCTCCC |
| | | AGCCTCTGTCCCTGCGTCCGGAggcatgtagacccgcagctggtggggccgtgcata |
| | | cccggggtcttgacttcgcctgcgatatctacatttgggcccctctggctggtacttgcggggtcctgctgcttt |
| | | cactcgtgatcactctttactgtaagcgcggtcggaagaagctgctgtacatctttaagcaacccttcatgagg |
| | | cctgtgcagactactcaagaggaggacggctgttcatgccggttcccagaggaggaggaaggcggctgc |
| | | gaactgcgcgtgaaattcagccgcagcgcagatgctccagcctacaagcaggggcagaaccagctctac |
| | | aacgaactcaatcttggtcggagagaggagtacgacgtgctggacaagcggagaggacgggacccaga |
| | | aatgggcgggaagccgcgcagaaagaatccccaagagggcctgtacaacgagctccaaaaggataaga |
| | | tggcagaagcctatagcgagattggtatgaaaggggaacgcagaagaggcaaaggccacgacggactgt |
| | | accagggactcagcaccgccaccaaggacacctatgacgctcttcacatgcaggccctgccgcctcgg |
| hzCAR123- | 141 | MALPVTALLLPLALLLHAARPEVQLVQSGAEVKKPGESLRISCKGS |
| 17 AA | | GYTFTSYWMNWVRQ |
| | | MPGKGLEWMGRIDPYDSETHYNQKFKDHVTISVDKSISTAYLQWSS |
| | | LKASDTAMYYCARG |
| | | NWDDYWGQGTTVTVSSGGGGSGGGGSGGGGSGGGGSDVQLTQSP |
| | | SFLSASVGDRVTITCR |
| | | ASKSISKDLAWYQQKPGKAPKLLIYSGSTLQSGVPSRFSGSGSGTEF |
| | | TLTISSLQPEDFA |
| | | TYYCQQHNKYPYTFGGGTKVEIKTTTPAPRPPTPAPTIASQPLSLRPE |
| | | ACRPAAGGAVHT |
| | | RGLDFACDIYIWAPLAGTCGVLLLSLVITLYCKRGRKKLLYIFKQPF |
| | | MRPVQTTQEEDGC |
| | | SCRFPEEEEGGCELRVKFSRSADAPAYKQGQNQLYNELNLGRREEY |
| | | DVLDKRRGRDPEMG |
| | | GKPRRKNPQEGLYNELQKDKMAEAYSEIGMKGERRRGKGHDGLY |
| | | QGLSTATKDTYDALHM |
| | | QALPPR |
| hzCAR123- | 200 | MALPVTALLLPLALLLHAARPEVQLVQSGAEVKKPGESLRISCKGS |
| 17 | | GYTFTSYWMNWVRQ |
| scFv | | MPGKGLEWMGRIDPYDSETHYNQKFKDHVTISVDKSISTAYLQWSS |
| | | LKASDTAMYYCARG |
| | | NWDDYWGQGTTVTVSSGGGGSGGGGSGGGGSGGGGSDVQLTQSP |
| | | SFLSASVGDRVTITCR |
| | | ASKSISKDLAWYQQKPGKAPKLLIYSGSTLQSGVPSRFSGSGSGTEF |
| | | TLTISSLQPEDFA |
| | | TYYCQQHNKYPYTFGGGTKVEIK |
| hzCAR123- | 259 | EVQLVQSGAEVKKPGESLRISCKGSGYTFTSYWMNWVRQMPGKGL |
| 17 VH | | EWMGRIDPYDSETHYNQKFKDHVTISVDKSISTAYLQWSSLKASDT |
| | | AMYYCARGNWDDYWGQGTTVTVSS |
| hzCAR123- | 318 | DVQLTQSPSFLSASVGDRVTITCRASKSISKDLAWYQQKPGKAPKLL |
| 17 VL | | IYSGSTLQSGVPSRFSGSGSGTEFTLTISSLQPEDFATYYCQQHNKYP |
| | | YTFGGGTKVEIK |
| hzCAR123- | 83 | ATGGCCCTCCCTGTCACCGCCCTGCTGCTTCCGCTGGCTCTTCTG |
| 18 NT | | CTCCACGCCGCTCGGCCCGAGGTGCAGCTGGTGCAGAGCGGAGC |
| | | CGAGGTCAAGAAGCCTGGAGAATCCCTGAGGATCAGCTGCAAAG |
| | | GCAGCGGGTATACCTTCACCTCCTACTGGATGAATTGGGTCCGCC |
| | | AGATGCCCGGAAAAGGCCTGGAGTGGATGGGACGGATTGACCCC |
| | | TACGACTCGGAAACCCATTACAACCAGAAGTTCAAGGATCACGT |
| | | GACCATCTCCGTGGACAAGTCCATTTCCACTGCGTACCTCCAGTG |
| | | GTCAAGCCTGAAGGCCTCCGACACTGCTATGTACTACTGCGCAC |
| | | GCGGAAACTGGGATGATTACTGGGGACAGGGAACAACCGTGACT |
| | | GTGTCCTCCGGGGGTGGCGGTAGCGGAGGAGGGGGCTCCGGCGG |
| | | CGGCGGCTCAGGGGGCGGAGGAAGCGAAGTGGTGCTGACCCAG |
| | | TCGCCCGCAACCCTCTCTCTGTCGCCGGGAGAACGCGCCACTCTT |
| | | TCCTGTCGGGCGTCCAAGAGCATCTCAAAGGACCTCGCCTGGTA |
| | | CCAGCAGAAGCCTGGTCAAGCCCCGCGGCTGCTGATCTACTCCG |
| | | GCTCCACGCTGCAATCAGGAATCCCAGCCAGATTTTCCGGTTCGG |
| | | GGTCGGGGACTGACTTCACCTTGACCATTAGCTCGCTGGAACCTG |
| | | AGGACTTCGCCGTGTATTACTGCCAGCAGCACAACAAGTACCCG |
| | | TACACCTTCGGAGGCGGTACTAAGGTCGAGATCAAGACCACTAC |
| | | CCCAGCACCGAGGCCACCCACCCCGGCTCCTACCATCGCCTCCC |
| | | AGCCTCTGTCCCTGCGTCCGGAggcatgtagacccgcagctggtggggccgtgcata |
| | | cccggggtcttgacttcgcctgcgatatctacatttgggcccctctggctggtacttgcggggtcctgctgcttt |
| | | cactcgtgatcactctttactgtaagcgcggtcggaagaagctgctgtacatctttaagcaacccttcatgagg |
| | | cctgtgcagactactcaagaggaggacggctgttcatgccggttcccagaggaggaggaaggcggctgc |
| | | gaactgcgcgtgaaattcagccgcagcgcagatgctccagcctacaagcaggggcagaaccagctctac |
| | | aacgaactcaatcttggtcggagagaggagtacgacgtgctggacaagcggagaggacgggacccaga |
| | | aatgggcgggaagccgcgcagaaagaatccccaagagggcctgtacaacgagctccaaaaggataaga |
| | | tggcagaagcctatagcgagattggtatgaaaggggaacgcagaagaggcaaaggccacgacggactgt |
| | | accagggactcagcaccgccaccaaggacacctatgacgctcttcacatgcaggccctgccgcctcgg |
| hzCAR123- | 142 | MALPVTALLLPLALLLHAARPEVQLVQSGAEVKKPGESLRISCKGS |
| 18 AA | | GYTFTSYWMNWVRQ |
| | | MPGKGLEWMGRIDPYDSETHYNQKFKDHVTISVDKSISTAYLQWSS |
| | | LKASDTAMYYCARG |
| | | NWDDYWGQGTTVTVSSGGGGSGGGGSGGGGSGGGGSEVVLTQSP |
| | | ATLSLSPGERATLSCR |
| | | ASKSISKDLAWYQQKPGQAPRLLIYSGSTLQSGIPARFSGSGSGTDFT |
| | | LTISSLEPEDFA |
| | | VYYCQQHNKYPYTFGGGTKVEIKTTTPAPRPPTPAPTIASQPLSLRPE |
| | | ACRPAAGGAVHT |
| | | RGLDFACDIYIWAPLAGTCGVLLLSLVITLYCKRGRKKLLYIFKQPF |
| | | MRPVQTTQEEDGC |
| | | SCRFPEEEEGGCELRVKFSRSADAPAYKQGQNQLYNELNLGRREEY |
| | | DVLDKRRGRDPEMG |
| | | GKPRRKNPQEGLYNELQKDKMAEAYSEIGMKGERRRGKGHDGLY |
| | | QGLSTATKDTYDALHM |
| | | QALPPR |
| hzCAR123- | 201 | MALPVTALLLPLALLLHAARPEVQLVQSGAEVKKPGESLRISCKGS |
| 18 | | GYTFTSYWMNWVRQ |
| scFv | | MPGKGLEWMGRIDPYDSETHYNQKFKDHVTISVDKSISTAYLQWSS |
| | | LKASDTAMYYCARG |
| | | NWDDYWGQGTTVTVSSGGGGSGGGGSGGGGSGGGGSEVVLTQSP |
| | | ATLSLSPGERATLSCR |
| | | ASKSISKDLAWYQQKPGQAPRLLIYSGSTLQSGIPARFSGSGSGTDFT |
| | | LTISSLEPEDFA |
| | | VYYCQQHNKYPYTFGGGTKVEIK |
| hzCAR123- | 260 | EVQLVQSGAEVKKPGESLRISCKGSGYTFTSYWMNWVRQMPGKGL |
| 18 VH | | EWMGRIDPYDSETHYNQKFKDHVTISVDKSISTAYLQWSSLKASDT |
| | | AMYYCARGNWDDYWGQGTTVTVSS |
| hzCAR123- | 319 | EVVLTQSPATLSLSPGERATLSCRASKSISKDLAWYQQKPGQAPRLL |
| 18 VL | | IYSGSTLQSGIPARFSGSGSGTDFTLTISSLEPEDFAVYYCQQHNKYP |
| | | YTFGGGTKVEIK |
| hzCAR123- | 84 | ATGGCCCTCCCTGTCACCGCCCTGCTGCTTCCGCTGGCTCTTCTG |
| 19 NT | | CTCCACGCCGCTCGGCCCGAGGTGCAGCTGGTGCAGAGCGGAGC |
| | | CGAGGTCAAGAAGCCTGGAGAATCCCTGAGGATCAGCTGCAAAG |
| | | GCAGCGGGTATACCTTCACCTCCTACTGGATGAATTGGGTCCGCC |
| | | AGATGCCCGGAAAAGGCCTGGAGTGGATGGGACGGATTGACCCC |
| | | TACGACTCGGAAACCCATTACAACCAGAAGTTCAAGGATCACGT |
| | | GACCATCTCCGTGGACAAGTCCATTTCCACTGCGTACCTCCAGTG |
| | | GTCAAGCCTGAAGGCCTCCGACACTGCTATGTACTACTGCGCAC |
| | | GCGGAAACTGGGATGATTACTGGGGACAGGGAACAACCGTGACT |
| | | GTGTCCTCCGGGGGTGGCGGTAGCGGAGGAGGGGGCTCCGGCGG |
| | | CGGCGGCTCAGGGGGCGGAGGAAGCGACGTCGTGATGACCCAG |
| | | TCACCGGCATTCCTGTCCGTGACTCCCGGAGAAAAGGTCACGAT |
| | | TACTTGCCGGGCGTCCAAGAGCATCTCCAAGGACCTCGCCTGGT |
| | | ACCAACAGAAGCCGGACCAGGCCCCTAAGCTGTTGATCTACTCG |
| | | GGGTCCACCCTTCAATCGGGAGTGCCATCGCGGTTTAGCGGTTCG |
| | | GGTTCTGGGACCGACTTCACTTTCACCATCTCCTCACTGGAAGCC |
| | | GAGGATGCCGCCACTTACTACTGTCAGCAGCACAACAAGTATCC |
| | | GTACACCTTCGGAGGCGGTACCAAAGTGGAGATCAAGACCACTA |
| | | CCCCAGCACCGAGGCCACCCACCCCGGCTCCTACCATCGCCTCCC |
| | | AGCCTCTGTCCCTGCGTCCGGAggcatgtagacccgcagctggtggggccgtgcata |
| | | cccggggtcttgacttcgcctgcgatatctacatttgggcccctctggctggtacttgcggggtcctgctgcttt |
| | | cactcgtgatcactctttactgtaagcgcggtcggaagaagctgctgtacatctttaagcaacccttcatgagg |
| | | cctgtgcagactactcaagaggaggacggctgttcatgccggttcccagaggaggaggaaggcggctgc |
| | | gaactgcgcgtgaaattcagccgcagcgcagatgctccagcctacaagcaggggcagaaccagctctac |
| | | aacgaactcaatcttggtcggagagaggagtacgacgtgctggacaagcggagaggacgggacccaga |
| | | aatgggcgggaagccgcgcagaaagaatccccaagagggcctgtacaacgagctccaaaaggataaga |
| | | tggcagaagcctatagcgagattggtatgaaaggggaacgcagaagaggcaaaggccacgacggactgt |
| | | accagggactcagcaccgccaccaaggacacctatgacgctcttcacatgcaggccctgccgcctcgg |
| hzCAR123- | 143 | MALPVTALLLPLALLLHAARPEVQLVQSGAEVKKPGESLRISCKGS |
| 19 AA | | GYTFTSYWMNWVRQ |
| | | MPGKGLEWMGRIDPYDSETHYNQKFKDHVTISVDKSISTAYLQWSS |
| | | LKASDTAMYYCARG |
| | | NWDDYWGQGTTVTVSSGGGGSGGGGSGGGGSGGGGSDVVMTQS |
| | | PAFLSVTPGEKVTITCR |
| | | ASKSISKDLAWYQQKPDQAPKLLIYSGSTLQSGVPSRFSGSGSGTDF |
| | | TFTISSLEAEDAA |
| | | TYYCQQHNKYPYTFGGGTKVEIKTTTPAPRPPTPAPTIASQPLSLRPE |
| | | ACRPAAGGAVHT |
| | | RGLDFACDIYIWAPLAGTCGVLLLSLVITLYCKRGRKKLLYIFKQPF |
| | | MRPVQTTQEEDGC |
| | | SCRFPEEEEGGCELRVKFSRSADAPAYKQGQNQLYNELNLGRREEY |
| | | DVLDKRRGRDPEMG |
| | | GKPRRKNPQEGLYNELQKDKMAEAYSEIGMKGERRRGKGHDGLY |
| | | QGLSTATKDTYDALHM |
| | | QALPPR |
| hzCAR123- | 202 | MALPVTALLLPLALLLHAARPEVQLVQSGAEVKKPGESLRISCKGS |
| 19 | | GYTFTSYWMNWVRQ |
| scFv | | MPGKGLEWMGRIDPYDSETHYNQKFKDHVTISVDKSISTAYLQWSS |
| | | LKASDTAMYYCARG |
| | | NWDDYWGQGTTVTVSSGGGGSGGGGSGGGGSGGGGSDVVMTQS |
| | | PAFLSVTPGEKVTITCR |
| | | ASKSISKDLAWYQQKPDQAPKLLIYSGSTLQSGVPSRFSGSGSGTDF |
| | | TFTISSLEAEDAA |
| | | TYYCQQHNKYPYTFGGGTKVEIK |
| hzCAR123- | 261 | EVQLVQSGAEVKKPGESLRISCKGSGYTFTSYWMNWVRQMPGKGL |
| 19 VH | | EWMGRIDPYDSETHYNQKFKDHVTISVDKSISTAYLQWSSLKASDT |
| | | AMYYCARGNWDDYWGQGTTVTVSS |
| hzCAR123- | 320 | DVVMTQSPAFLSVTPGEKVTITCRASKSISKDLAWYQQKPDQAPKL |
| 19 VL | | LIYSGSTLQSGVPSRFSGSGSGTDFTFTISSLEAEDAATYYCQQHNKY |
| | | PYTFGGGTKVEIK |
| hzCAR123- | 85 | ATGGCCCTCCCTGTCACCGCCCTGCTGCTTCCGCTGGCTCTTCTG |
| 20 NT | | CTCCACGCCGCTCGGCCCGAGGTGCAGCTGGTGCAGAGCGGAGC |
| | | CGAGGTCAAGAAGCCTGGAGAATCCCTGAGGATCAGCTGCAAAG |
| | | GCAGCGGGTATACCTTCACCTCCTACTGGATGAATTGGGTCCGCC |
| | | AGATGCCCGGAAAAGGCCTGGAGTGGATGGGACGGATTGACCCC |
| | | TACGACTCGGAAACCCATTACAACCAGAAGTTCAAGGATCACGT |
| | | GACCATCTCCGTGGACAAGTCCATTTCCACTGCGTACCTCCAGTG |
| | | GTCAAGCCTGAAGGCCTCCGACACTGCTATGTACTACTGCGCAC |
| | | GCGGAAACTGGGATGATTACTGGGGACAGGGAACAACCGTGACT |
| | | GTGTCCTCCGGGGGTGGCGGTAGCGGAGGAGGGGGCTCCGGCGG |
| | | CGGCGGCTCAGGGGGCGGAGGAAGCGACGTGGTCATGACTCAGT |
| | | CCCCGGACTCACTCGCGGTGTCGCTTGGAGAGAGAGCGACCATC |
| | | AACTGTCGGGCCTCAAAGAGCATCAGCAAGGACCTGGCCTGGTA |
| | | CCAGCAGAAGCCGGGACAGCCGCCAAAGCTGCTGATCTACTCCG |
| | | GGTCCACCTTGCAATCTGGTGTCCCTGACCGGTTCTCCGGTTCCG |
| | | GGTCGGGTACCGACTTCACGCTCACTATTTCGTCGCTGCAAGCCG |
| | | AAGATGTGGCCGTGTACTATTGCCAACAGCACAACAAGTACCCC |
| | | TACACTTTTGGCGGAGGCACCAAGGTGGAAATCAAGACCACTAC |
| | | CCCAGCACCGAGGCCACCCACCCCGGCTCCTACCATCGCCTCCC |
| | | AGCCTCTGTCCCTGCGTCCGGAggcatgtagacccgcagctggtggggccgtgcata |
| | | cccggggtcttgacttcgcctgcgatatctacatttgggcccctctggctggtacttgcggggtcctgctgcttt |
| | | cactcgtgatcactctttactgtaagcgcggtcggaagaagctgctgtacatctttaagcaacccttcatgagg |
| | | cctgtgcagactactcaagaggaggacggctgttcatgccggttcccagaggaggaggaaggcggctgc |
| | | gaactgcgcgtgaaattcagccgcagcgcagatgctccagcctacaagcaggggcagaaccagctctac |
| | | aacgaactcaatcttggtcggagagaggagtacgacgtgctggacaagcggagaggacgggacccaga |
| | | aatgggcgggaagccgcgcagaaagaatccccaagagggcctgtacaacgagctccaaaaggataaga |
| | | tggcagaagcctatagcgagattggtatgaaaggggaacgcagaagaggcaaaggccacgacggactgt |
| | | accagggactcagcaccgccaccaaggacacctatgacgctcttcacatgcaggccctgccgcctcgg |
| hzCAR123- | 144 | MALPVTALLLPLALLLHAARPEVQLVQSGAEVKKPGESLRISCKGS |
| 20 AA | | GYTFTSYWMNWVRQ |
| | | MPGKGLEWMGRIDPYDSETHYNQKFKDHVTISVDKSISTAYLQWSS |
| | | LKASDTAMYYCARG |
| | | NWDDYWGQGTTVTVSSGGGGSGGGGSGGGGSGGGGSDVVMTQS |
| | | PDSLAVSLGERATINCR |
| | | CATTACAACCAGAAGTTCAAGGATCACGTGACCATCTCCGTGGA |
| | | CAAGTCCATTTCCACTGCGTACCTCCAGTGGTCAAGCCTGAAGGC |
| | | CTCCGACACTGCTATGTACTACTGCGCACGCGGAAACTGGGATG |
| | | ATTACTGGGGACAGGGAACAACCGTGACTGTGTCCTCCACCACT |
| | | ACCCCAGCACCGAGGCCACCCACCCCGGCTCCTACCATCGCCTC |
| | | CCAGCCTCTGTCCCTGCGTCCGGAggcatgtagacccgcagctggtggggccgtgc |
| | | atacccggggtcttgacttcgcctgcgatatctacatttgggcccctctggctggtacttgcggggtcctgctg |
| | | ctttcactcgtgatcactctttactgtaagcgcggtcggaagaagctgctgtacatctttaagcaacccttcatg |
| | | aggcctgtgcagactactcaagaggaggacggctgttcatgccggttcccagaggaggaggaaggcggc |
| | | tgcgaactgcgcgtgaaattcagccgcagcgcagatgctccagcctacaagcaggggcagaaccagctct |
| | | acaacgaactcaatcttggtcggagagaggagtacgacgtgctggacaagcggagaggacgggaccca |
| | | gaaatgggcgggaagccgcgcagaaagaatccccaagagggcctgtacaacgagctccaaaaggataa |
| | | gatggcagaagcctatagcgagattggtatgaaaggggaacgcagaagaggcaaaggccacgacggac |
| | | tgtaccagggactcagcaccgccaccaaggacacctatgacgctcttcacatgcaggccctgccgcctcgg |
| hzCAR123- | 145 | MALPVTALLLPLALLLHAARPDVQLTQSPSFLSASVGDRVTITCRAS |
| 21 AA | | KSISKDLAWYQQK |
| | | PGKAPKLLIYSGSTLQSGVPSRFSGSGSGTEFTLTISSLQPEDFATYYC |
| | | QQHNKYPYTFG |
| | | GGTKVEIKGGGGSGGGGSGGGGSGGGGSEVQLVQSGAEVKKPGES |
| | | LRISCKGSGYTFTSY |
| | | WMNWVRQMPGKGLEWMGRIDPYDSETHYNQKFKDHVTISVDKSI |
| | | STAYLQWSSLKASDTA |
| | | MYYCARGNWDDYWGQGTTVTVSSTTTPAPRPPTPAPTIASQPLSLR |
| | | PEACRPAAGGAVHT |
| | | RGLDFACDIYIWAPLAGTCGVLLLSLVITLYCKRGRKKLLYIFKQPF |
| | | MRPVQTTQEEDGC |
| | | SCRFPEEEEGGCELRVKFSRSADAPAYKQGQNQLYNELNLGRREEY |
| | | DVLDKRRGRDPEMG |
| | | GKPRRKNPQEGLYNELQKDKMAEAYSEIGMKGERRRGKGHDGLY |
| | | QGLSTATKDTYDALHM |
| | | QALPPR |
| hzCAR123- | 204 | MALPVTALLLPLALLLHAARPDVQLTQSPSFLSASVGDRVTITCRAS |
| 21 | | KSISKDLAWYQQK |
| scFv | | PGKAPKLLIYSGSTLQSGVPSRFSGSGSGTEFTLTISSLQPEDFATYYC |
| | | QQHNKYPYTFG |
| | | GGTKVEIKGGGGSGGGGSGGGGSGGGGSEVQLVQSGAEVKKPGES |
| | | LRISCKGSGYTFTSY |
| | | WMNWVRQMPGKGLEWMGRIDPYDSETHYNQKFKDHVTISVDKSI |
| | | STAYLQWSSLKASDTA |
| | | MYYCARGNWDDYWGQGTTVTVSS |
| hzCAR123- | 263 | EVQLVQSGAEVKKPGESLRISCKGSGYTFTSYWMNWVRQMPGKGL |
| 21 VH | | EWMGRIDPYDSETHYNQKFKDHVTISVDKSISTAYLQWSSLKASDT |
| | | AMYYCARGNWDDYWGQGTTVTVSS |
| hzCAR123- | 322 | DVQLTQSPSFLSASVGDRVTITCRASKSISKDLAWYQQKPGKAPKLL |
| 21 VL | | IYSGSTLQSGVPSRFSGSGSGTEFTLTISSLQPEDFATYYCQQHNKYP |
| | | YTFGGGTKVEIK |
| hzCAR123- | 87 | ATGGCCCTCCCTGTCACCGCCCTGCTGCTTCCGCTGGCTCTTCTG |
| 22 NT | | CTCCACGCCGCTCGGCCCGAAGTGGTGCTGACCCAGTCGCCCGC |
| | | AACCCTCTCTCTGTCGCCGGGAGAACGCGCCACTCTTTCCTGTCG |
| | | GGCGTCCAAGAGCATCTCAAAGGACCTCGCCTGGTACCAGCAGA |
| | | AGCCTGGTCAAGCCCCGCGGCTGCTGATCTACTCCGGCTCCACGC |
| | | TGCAATCAGGAATCCCAGCCAGATTTTCCGGTTCGGGGTCGGGG |
| | | ACTGACTTCACCTTGACCATTAGCTCGCTGGAACCTGAGGACTTC |
| | | GCCGTGTATTACTGCCAGCAGCACAACAAGTACCCGTACACCTT |
| | | CGGAGGCGGTACTAAGGTCGAGATCAAGGGGGGTGGCGGTAGC |
| | | GGAGGAGGGGGCTCCGGCGGCGGCGGCTCAGGGGGCGGAGGAA |
| | | GCGAGGTGCAGCTGGTGCAGAGCGGAGCCGAGGTCAAGAAGCC |
| | | TGGAGAATCCCTGAGGATCAGCTGCAAAGGCAGCGGGTATACCT |
| | | TCACCTCCTACTGGATGAATTGGGTCCGCCAGATGCCCGGAAAA |
| | | GGCCTGGAGTGGATGGGACGGATTGACCCCTACGACTCGGAAAC |
| | | CCATTACAACCAGAAGTTCAAGGATCACGTGACCATCTCCGTGG |
| | | ACAAGTCCATTTCCACTGCGTACCTCCAGTGGTCAAGCCTGAAG |
| | | GCCTCCGACACTGCTATGTACTACTGCGCACGCGGAAACTGGGA |
| | | TGATTACTGGGGACAGGGAACAACCGTGACTGTGTCCTCCACCA |
| | | CTACCCCAGCACCGAGGCCACCCACCCCGGCTCCTACCATCGCCT |
| | | CCCAGCCTCTGTCCCTGCGTCCGGAggcatgtagacccgcagctggtggggccgtg |
| | | catacccggggtcttgacttcgcctgcgatatctacatttgggcccctctggctggtacttgcggggtcctgct |
| | | gctttcactcgtgatcactctttactgtaagcgcggtcggaagaagctgctgtacatctttaagcaacccttcat |
| | | gaggcctgtgcagactactcaagaggaggacggctgttcatgccggttcccagaggaggaggaaggcgg |
| | | ctgcgaactgcgcgtgaaattcagccgcagcgcagatgctccagcctacaagcaggggcagaaccagct |
| | | ctacaacgaactcaatcttggtcggagagaggagtacgacgtgctggacaagcggagaggacgggaccc |
| | | agaaatgggcgggaagccgcgcagaaagaatccccaagagggcctgtacaacgagctccaaaaggata |
| | | agatggcagaagcctatagcgagattggtatgaaaggggaacgcagaagaggcaaaggccacgacgga |
| | | ctgtaccagggactcagcaccgccaccaaggacacctatgacgctcttcacatgcaggccctgccgcctcgg |
| hzCAR123- | 146 | MALPVTALLLPLALLLHAARPEVVLTQSPATLSLSPGERATLSCRAS |
| 22 AA | | KSISKDLAWYQQK |
| | | PGQAPRLLIYSGSTLQSGIPARFSGSGSGTDFTLTISSLEPEDFAVYYC |
| | | QQHNKYPYTFG |
| | | GGTKVEIKGGGGSGGGGSGGGGSGGGGSEVQLVQSGAEVKKPGES |
| | | LRISCKGSGYTFTSY |
| | | WMNWVRQMPGKGLEWMGRIDPYDSETHYNQKFKDHVTISVDKSI |
| | | STAYLQWSSLKASDTA |
| | | MYYCARGNWDDYWGQGTTVTVSSTTTPAPRPPTPAPTIASQPLSLR |
| | | PEACRPAAGGAVHT |
| | | RGLDFACDIYIWAPLAGTCGVLLLSLVITLYCKRGRKKLLYIFKQPF |
| | | MRPVQTTQEEDGC |
| | | SCRFPEEEEGGCELRVKFSRSADAPAYKQGQNQLYNELNLGRREEY |
| | | DVLDKRRGRDPEMG |
| | | GKPRRKNPQEGLYNELQKDKMAEAYSEIGMKGERRRGKGHDGLY |
| | | QGLSTATKDTYDALHM |
| | | QALPPR |
| hzCAR123- | 205 | MALPVTALLLPLALLLHAARPEVVLTQSPATLSLSPGERATLSCRAS |
| 22 | | KSISKDLAWYQQK |
| scFv | | PGQAPRLLIYSGSTLQSGIPARFSGSGSGTDFTLTISSLEPEDFAVYYC |
| | | QQHNKYPYTFG |
| | | GGTKVEIKGGGGSGGGGSGGGGSGGGGSEVQLVQSGAEVKKPGES |
| | | LRISCKGSGYTFTSY |
| | | WMNWVRQMPGKGLEWMGRIDPYDSETHYNQKFKDHVTISVDKSI |
| | | STAYLQWSSLKASDTA |
| | | MYYCARGNWDDYWGQGTTVTVSS |
| hzCAR123- | 264 | EVQLVQSGAEVKKPGESLRISCKGSGYTFTSYWMNWVRQMPGKGL |
| 22 VH | | EWMGRIDPYDSETHYNQKFKDHVTISVDKSISTAYLQWSSLKASDT |
| | | AMYYCARGNWDDYWGQGTTVTVSS |
| hzCAR123- | 323 | EVVLTQSPATLSLSPGERATLSCRASKSISKDLAWYQQKPGQAPRLL |
| 22 VL | | IYSGSTLQSGIPARFSGSGSGTDFTLTISSLEPEDFAVYYCQQHNKYP |
| | | YTFGGGTKVEIK |
| hzCAR123- | 88 | ATGGCCCTCCCTGTCACCGCCCTGCTGCTTCCGCTGGCTCTTCTG |
| 23 NT | | CTCCACGCCGCTCGGCCCGACGTCGTGATGACCCAGTCACCGGC |
| | | ATTCCTGTCCGTGACTCCCGGAGAAAAGGTCACGATTACTTGCCG |
| | | GGCGTCCAAGAGCATCTCCAAGGACCTCGCCTGGTACCAACAGA |
| | | AGCCGGACCAGGCCCCTAAGCTGTTGATCTACTCGGGGTCCACC |
| | | CTTCAATCGGGAGTGCCATCGCGGTTTAGCGGTTCGGGTTCTGGG |
| | | ACCGACTTCACTTTCACCATCTCCTCACTGGAAGCCGAGGATGCC |
| | | GCCACTTACTACTGTCAGCAGCACAACAAGTATCCGTACACCTTC |
| | | GGAGGCGGTACCAAAGTGGAGATCAAGGGGGGTGGCGGTAGCG |
| | | GAGGAGGGGGCTCCGGCGGCGGCGGCTCAGGGGGCGGAGGAAG |
| | | CGAGGTGCAGCTGGTGCAGAGCGGAGCCGAGGTCAAGAAGCCT |
| | | GGAGAATCCCTGAGGATCAGCTGCAAAGGCAGCGGGTATACCTT |
| | | CACCTCCTACTGGATGAATTGGGTCCGCCAGATGCCCGGAAAAG |
| | | GCCTGGAGTGGATGGGACGGATTGACCCCTACGACTCGGAAACC |
| | | CATTACAACCAGAAGTTCAAGGATCACGTGACCATCTCCGTGGA |
| | | CAAGTCCATTTCCACTGCGTACCTCCAGTGGTCAAGCCTGAAGGC |
| | | CTCCGACACTGCTATGTACTACTGCGCACGCGGAAACTGGGATG |
| | | ATTACTGGGGACAGGGAACAACCGTGACTGTGTCCTCCACCACT |
| | | ACCCCAGCACCGAGGCCACCCACCCCGGCTCCTACCATCGCCTC |
| | | CCAGCCTCTGTCCCTGCGTCCGGAggcatgtagacccgcagctggtggggccgtgc |
| | | atacccggggtcttgacttcgcctgcgatatctacatttgggcccctctggctggtacttgcggggtcctgctg |
| | | ctttcactcgtgatcactctttactgtaagcgcggtcggaagaagctgctgtacatctttaagcaacccttcatg |
| | | aggcctgtgcagactactcaagaggaggacggctgttcatgccggttcccagaggaggaggaaggcggc |
| | | tgcgaactgcgcgtgaaattcagccgcagcgcagatgctccagcctacaagcaggggcagaaccagctct |
| | | acaacgaactcaatcttggtcggagagaggagtacgacgtgctggacaagcggagaggacgggaccca |
| | | gaaatgggcgggaagccgcgcagaaagaatccccaagagggcctgtacaacgagctccaaaaggataa |
| | | gatggcagaagcctatagcgagattggtatgaaaggggaacgcagaagaggcaaaggccacgacggac |
| | | tgtaccagggactcagcaccgccaccaaggacacctatgacgctcttcacatgcaggccctgccgcctcgg |
| hzCAR123- | 147 | MALPVTALLLPLALLLHAARPDVVMTQSPAFLSVTPGEKVTITCRAS |
| 23 AA | | KSISKDLAWYQQK |
| | | PDQAPKLLIYSGSTLQSGVPSRFSGSGSGTDFTFTISSLEAEDAATYY |
| | | CQQHNKYPYTFG |
| | | GGTKVEIKGGGGSGGGGSGGGGSGGGGSEVQLVQSGAEVKKPGES |
| | | LRISCKGSGYTFTSY |
| | | WMNWVRQMPGKGLEWMGRIDPYDSETHYNQKFKDHVTISVDKSI |
| | | STAYLQWSSLKASDTA |
| | | MYYCARGNWDDYWGQGTTVTVSSTTTPAPRPPTPAPTIASQPLSLR |
| | | PEACRPAAGGAVHT |
| | | RGLDFACDIYIWAPLAGTCGVLLLSLVITLYCKRGRKKLLYIFKQPF |
| | | MRPVQTTQEEDGC |
| | | SCRFPEEEEGGCELRVKFSRSADAPAYKQGQNQLYNELNLGRREEY |
| | | DVLDKRRGRDPEMG |
| | | GKPRRKNPQEGLYNELQKDKMAEAYSEIGMKGERRRGKGHDGLY |
| | | QGLSTATKDTYDALHM |
| | | QALPPR |
| hzCAR123- | 206 | MALPVTALLLPLALLLHAARPDVVMTQSPAFLSVTPGEKVTITCRAS |
| 23 | | KSISKDLAWYQQK |
| scFv | | PDQAPKLLIYSGSTLQSGVPSRFSGSGSGTDFTFTISSLEAEDAATYY |
| | | CQQHNKYPYTFG |
| | | GGTKVEIKGGGGSGGGGSGGGGSGGGGSEVQLVQSGAEVKKPGES |
| | | LRISCKGSGYTFTSY |
| | | WMNWVRQMPGKGLEWMGRIDPYDSETHYNQKFKDHVTISVDKSI |
| | | STAYLQWSSLKASDTA |
| | | MYYCARGNWDDYWGQGTTVTVSS |
| hzCAR123- | 265 | EVQLVQSGAEVKKPGESLRISCKGSGYTFTSYWMNWVRQMPGKGL |
| 23 VH | | EWMGRIDPYDSETHYNQKFKDHVTISVDKSISTAYLQWSSLKASDT |
| | | AMYYCARGNWDDYWGQGTTVTVSS |
| hzCAR123- | 324 | DVVMTQSPAFLSVTPGEKVTITCRASKSISKDLAWYQQKPDQAPKL |
| 23 VL | | LIYSGSTLQSGVPSRFSGSGSGTDFTFTISSLEAEDAATYYCQQHNKY |
| | | PYTFGGGTKVEIK |
| hzCAR123- | 89 | ATGGCCCTCCCTGTCACCGCCCTGCTGCTTCCGCTGGCTCTTCTG |
| 24 NT | | CTCCACGCCGCTCGGCCCGACGTGGTCATGACTCAGTCCCCGGA |
| | | CTCACTCGCGGTGTCGCTTGGAGAGAGAGCGACCATCAACTGTC |
| | | GGGCCTCAAAGAGCATCAGCAAGGACCTGGCCTGGTACCAGCAG |
| | | AAGCCGGGACAGCCGCCAAAGCTGCTGATCTACTCCGGGTCCAC |
| | | CTTGCAATCTGGTGTCCCTGACCGGTTCTCCGGTTCCGGGTCGGG |
| | | TACCGACTTCACGCTCACTATTTCGTCGCTGCAAGCCGAAGATGT |
| | | GGCCGTGTACTATTGCCAACAGCACAACAAGTACCCCTACACTTT |
| | | TGGCGGAGGCACCAAGGTGGAAATCAAGGGGGGTGGCGGTAGC |
| | | GGAGGAGGGGGCTCCGGCGGCGGCGGCTCAGGGGGCGGAGGAA |
| | | GCGAGGTGCAGCTGGTGCAGAGCGGAGCCGAGGTCAAGAAGCC |
| | | TGGAGAATCCCTGAGGATCAGCTGCAAAGGCAGCGGGTATACCT |
| | | TCACCTCCTACTGGATGAATTGGGTCCGCCAGATGCCCGGAAAA |
| | | GGCCTGGAGTGGATGGGACGGATTGACCCCTACGACTCGGAAAC |
| | | CCATTACAACCAGAAGTTCAAGGATCACGTGACCATCTCCGTGG |
| | | ACAAGTCCATTTCCACTGCGTACCTCCAGTGGTCAAGCCTGAAG |
| | | GCCTCCGACACTGCTATGTACTACTGCGCACGCGGAAACTGGGA |
| | | TGATTACTGGGGACAGGGAACAACCGTGACTGTGTCCTCCACCA |
| | | CTACCCCAGCACCGAGGCCACCCACCCCGGCTCCTACCATCGCCT |
| | | CCCAGCCTCTGTCCCTGCGTCCGGAggcatgtagacccgcagctggtggggccgtg |
| | | catacccggggtcttgacttcgcctgcgatatctacatttgggcccctctggctggtacttgcggggtcctgct |
| | | gctttcactcgtgatcactctttactgtaagcgcggtcggaagaagctgctgtacatctttaagcaacccttcat |
| | | gaggcctgtgcagactactcaagaggaggacggctgttcatgccggttcccagaggaggaggaaggcgg |
| | | ctgcgaactgcgcgtgaaattcagccgcagcgcagatgctccagcctacaagcaggggcagaaccagct |
| | | ctacaacgaactcaatcttggtcggagagaggagtacgacgtgctggacaagcggagaggacgggaccc |
| | | agaaatgggcgggaagccgcgcagaaagaatccccaagagggcctgtacaacgagctccaaaaggata |
| | | agatggcagaagcctatagcgagattggtatgaaaggggaacgcagaagaggcaaaggccacgacgga |
| | | ctgtaccagggactcagcaccgccaccaaggacacctatgacgctcttcacatgcaggccctgccgcctcgg |
| hzCAR123- | 148 | MALPVTALLLPLALLLHAARPDVVMTQSPDSLAVSLGERATINCRA |
| 24 AA | | SKSISKDLAWYQQK |
| | | PGQPPKLLIYSGSTLQSGVPDRFSGSGSGTDFTLTISSLQAEDVAVYY |
| | | CQQHNKYPYTFG |
| | | GGTKVEIKGGGGSGGGGSGGGGSGGGGSEVQLVQSGAEVKKPGES |
| | | LRISCKGSGYTFTSY |
| | | WMNWVRQMPGKGLEWMGRIDPYDSETHYNQKFKDHVTISVDKSI |
| | | STAYLQWSSLKASDTA |
| | | MYYCARGNWDDYWGQGTTVTVSSTTTPAPRPPTPAPTIASQPLSLR |
| | | PEACRPAAGGAVHT |
| | | RGLDFACDIYIWAPLAGTCGVLLLSLVITLYCKRGRKKLLYIFKQPF |
| | | MRPVQTTQEEDGC |
| | | SCRFPEEEEGGCELRVKFSRSADAPAYKQGQNQLYNELNLGRREEY |
| | | DVLDKRRGRDPEMG |
| | | GKPRRKNPQEGLYNELQKDKMAEAYSEIGMKGERRRGKGHDGLY |
| | | QGLSTATKDTYDALHM |
| | | QALPPR |
| hzCAR123- | 207 | MALPVTALLLPLALLLHAARPDVVMTQSPDSLAVSLGERATINCRA |
| 24 | | SKSISKDLAWYQQK |
| scFv | | PGQPPKLLIYSGSTLQSGVPDRFSGSGSGTDFTLTISSLQAEDVAVYY |
| | | CQQHNKYPYTFG |
| | | GGTKVEIKGGGGSGGGGSGGGGSGGGGSEVQLVQSGAEVKKPGES |
| | | LRISCKGSGYTFTSY |
| | | WMNWVRQMPGKGLEWMGRIDPYDSETHYNQKFKDHVTISVDKSI |
| | | STAYLQWSSLKASDTA |
| | | MYYCARGNWDDYWGQGTTVTVSS |
| hzCAR123- | 266 | EVQLVQSGAEVKKPGESLRISCKGSGYTFTSYWMNWVRQMPGKGL |
| 24 VH | | EWMGRIDPYDSETHYNQKFKDHVTISVDKSISTAYLQWSSLKASDT |
| | | AMYYCARGNWDDYWGQGTTVTVSS |
| hzCAR123- | 325 | DVVMTQSPDSLAVSLGERATINCRASKSISKDLAWYQQKPGQPPKL |
| 24 VL | | LIYSGSTLQSGVPDRFSGSGSGTDFTLTISSLQAEDVAVYYCQQHNK |
| | | YPYTFGGGTKVEIK |
| hzCAR123- | 90 | ATGGCCCTCCCTGTCACCGCCCTGCTGCTTCCGCTGGCTCTTCTG |
| 25 NT | | CTCCACGCCGCTCGGCCCGAAGTGCAGCTCGTCGAGAGCGGAGG |
| | | GGGACTGGTGCAGCCCGGAGGAAGCCTGAGGCTGTCCTGCGCTG |
| | | CCTCCGGCTACACCTTCACCTCCTACTGGATGAACTGGGTCAGAC |
| | | AGGCACCTGGAAAGGGACTGGTCTGGGTGTCGCGCATTGACCCC |
| | | TACGACTCCGAAACCCATTACAATCAGAAATTCAAGGACCGCTT |
| | | CACCATCTCCGTGGACAAAGCCAAGAGCACCGCGTACCTCCAAA |
| | | TGAACTCCCTGCGCGCTGAGGATACAGCAGTGTACTATTGCGCC |
| | | CGGGGAAACTGGGATGATTACTGGGGCCAGGGAACTACTGTGAC |
| | | TGTGTCATCCGGGGGTGGCGGTAGCGGAGGAGGGGGCTCCGGCG |
| | | GCGGCGGCTCAGGGGGCGGAGGAAGCGACGTGCAGCTCACCCA |
| | | GTCGCCCTCATTTCTGTCGGCCTCAGTGGGAGACAGAGTGACCAT |
| | | TACTTGTCGGGCCTCCAAGAGCATCTCCAAGGACCTGGCCTGGT |
| | | ATCAGCAGAAGCCAGGAAAGGCGCCTAAGTTGCTCATCTACTCG |
| | | GGGTCGACCCTGCAATCTGGCGTGCCGTCCCGGTTCTCCGGTTCG |
| | | GGAAGCGGTACCGAATTCACCCTTACTATCTCCTCCCTGCAACCG |
| | | GAGGACTTCGCCACCTACTACTGCCAACAGCACAACAAGTACCC |
| | | GTACACTTTCGGGGGTGGCACGAAGGTCGAAATCAAGACCACTA |
| | | CCCCAGCACCGAGGCCACCCACCCCGGCTCCTACCATCGCCTCCC |
| | | AGCCTCTGTCCCTGCGTCCGGAggcatgtagacccgcagctggtggggccgtgcata |
| | | cccggggtcttgacttcgcctgcgatatctacatttgggcccctctggctggtacttgcggggtcctgctgcttt |
| | | cactcgtgatcactctttactgtaagcgcggtcggaagaagctgctgtacatctttaagcaacccttcatgagg |
| | | cctgtgcagactactcaagaggaggacggctgttcatgccggttcccagaggaggaggaaggcggctgc |
| | | gaactgcgcgtgaaattcagccgcagcgcagatgctccagcctacaagcaggggcagaaccagctctac |
| | | aacgaactcaatcttggtcggagagaggagtacgacgtgctggacaagcggagaggacgggacccaga |
| | | aatgggcgggaagccgcgcagaaagaatccccaagagggcctgtacaacgagctccaaaaggataaga |
| | | tggcagaagcctatagcgagattggtatgaaaggggaacgcagaagaggcaaaggccacgacggactgt |
| | | accagggactcagcaccgccaccaaggacacctatgacgctcttcacatgcaggccctgccgcctcgg |
| hzCAR123- | 149 | MALPVTALLLPLALLLHAARPEVQLVESGGGLVQPGGSLRLSCAAS |
| 25 AA | | GYTFTSYWMNWVRQ |
| | | APGKGLVWVSRIDPYDSETHYNQKFKDRFTISVDKAKSTAYLQMNS |
| | | LRAEDTAVYYCARG |
| | | NWDDYWGQGTTVTVSSGGGGSGGGGSGGGGSGGGGSDVQLTQSP |
| | | SFLSASVGDRVTITCR |
| | | ASKSISKDLAWYQQKPGKAPKLLIYSGSTLQSGVPSRFSGSGSGTEF |
| | | TLTISSLQPEDFA |
| | | TYYCQQHNKYPYTFGGGTKVEIKTTTPAPRPPTPAPTIASQPLSLRPE |
| | | ACRPAAGGAVHT |
| | | RGLDFACDIYIWAPLAGTCGVLLLSLVITLYCKRGRKKLLYIFKQPF |
| | | MRPVQTTQEEDGC |
| | | SCRFPEEEEGGCELRVKFSRSADAPAYKQGQNQLYNELNLGRREEY |
| | | DVLDKRRGRDPEMG |
| | | GKPRRKNPQEGLYNELQKDKMAEAYSEIGMKGERRRGKGHDGLY |
| | | QGLSTATKDTYDALHM |
| | | QALPPR |
| hzCAR123- | 208 | MALPVTALLLPLALLLHAARPEVQLVESGGGLVQPGGSLRLSCAAS |
| 25 | | GYTFTSYWMNWVRQ |
| scFv | | APGKGLVWVSRIDPYDSETHYNQKFKDRFTISVDKAKSTAYLQMNS |
| | | LRAEDTAVYYCARG |
| | | NWDDYWGQGTTVTVSSGGGGSGGGGSGGGGSGGGGSDVQLTQSP |
| | | SFLSASVGDRVTITCR |
| | | ASKSISKDLAWYQQKPGKAPKLLIYSGSTLQSGVPSRFSGSGSGTEF |
| | | TLTISSLQPEDFA |
| | | TYYCQQHNKYPYTFGGGTKVEIK |
| hzCAR123- | 267 | EVQLVESGGGLVQPGGSLRLSCAASGYTFTSYWMNWVRQAPGKG |
| 25 VH | | LVWVSRIDPYDSETHYNQKFKDRFTISVDKAKSTAYLQMNSLRAED |
| | | TAVYYCARGNWDDYWGQGTTVTVSS |
| hzCAR123- | 326 | DVQLTQSPSFLSASVGDRVTITCRASKSISKDLAWYQQKPGKAPKLL |
| 25 VL | | IYSGSTLQSGVPSRFSGSGSGTEFTLTISSLQPEDFATYYCQQHNKYP |
| | | YTFGGGTKVEIK |
| hzCAR123- | 91 | ATGGCCCTCCCTGTCACCGCCCTGCTGCTTCCGCTGGCTCTTCTG |
| 26 NT | | CTCCACGCCGCTCGGCCCGAAGTGCAGCTCGTCGAGAGCGGAGG |
| | | GGGACTGGTGCAGCCCGGAGGAAGCCTGAGGCTGTCCTGCGCTG |
| | | CCTCCGGCTACACCTTCACCTCCTACTGGATGAACTGGGTCAGAC |
| | | AGGCACCTGGAAAGGGACTGGTCTGGGTGTCGCGCATTGACCCC |
| | | TACGACTCCGAAACCCATTACAATCAGAAATTCAAGGACCGCTT |
| | | CACCATCTCCGTGGACAAAGCCAAGAGCACCGCGTACCTCCAAA |
| | | TGAACTCCCTGCGCGCTGAGGATACAGCAGTGTACTATTGCGCC |
| | | CGGGGAAACTGGGATGATTACTGGGGCCAGGGAACTACTGTGAC |
| | | TGTGTCATCCGGGGGTGGCGGTAGCGGAGGAGGGGGCTCCGGCG |
| | | GCGGCGGCTCAGGGGGCGGAGGAAGCGAAGTGGTGCTGACCCA |
| | | GTCGCCCGCAACCCTCTCTCTGTCGCCGGGAGAACGCGCCACTCT |
| | | TTCCTGTCGGGCGTCCAAGAGCATCTCAAAGGACCTCGCCTGGT |
| | | ACCAGCAGAAGCCTGGTCAAGCCCCGCGGCTGCTGATCTACTCC |
| | | GGCTCCACGCTGCAATCAGGAATCCCAGCCAGATTTTCCGGTTCG |
| | | GGGTCGGGGACTGACTTCACCTTGACCATTAGCTCGCTGGAACCT |
| | | GAGGACTTCGCCGTGTATTACTGCCAGCAGCACAACAAGTACCC |
| | | GTACACCTTCGGAGGCGGTACTAAGGTCGAGATCAAGACCACTA |
| | | CCCCAGCACCGAGGCCACCCACCCCGGCTCCTACCATCGCCTCCC |
| | | AGCCTCTGTCCCTGCGTCCGGAggcatgtagacccgcagctggtggggccgtgcata |
| | | cccggggtcttgacttcgcctgcgatatctacatttgggcccctctggctggtacttgcggggtcctgctgcttt |
| | | cactcgtgatcactctttactgtaagcgcggtcggaagaagctgctgtacatctttaagcaacccttcatgagg |
| | | cctgtgcagactactcaagaggaggacggctgttcatgccggttcccagaggaggaggaaggcggctgc |
| | | gaactgcgcgtgaaattcagccgcagcgcagatgctccagcctacaagcaggggcagaaccagctctac |
| | | aacgaactcaatcttggtcggagagaggagtacgacgtgctggacaagcggagaggacgggacccaga |
| | | aatgggcgggaagccgcgcagaaagaatccccaagagggcctgtacaacgagctccaaaaggataaga |
| | | tggcagaagcctatagcgagattggtatgaaaggggaacgcagaagaggcaaaggccacgacggactgt |
| | | accagggactcagcaccgccaccaaggacacctatgacgctcttcacatgcaggccctgccgcctcgg |
| hzCAR123- | 150 | MALPVTALLLPLALLLHAARPEVQLVESGGGLVQPGGSLRLSCAAS |
| 26 AA | | GYTFTSYWMNWVRQ |
| | | APGKGLVWVSRIDPYDSETHYNQKFKDRFTISVDKAKSTAYLQMNS |
| | | LRAEDTAVYYCARG |
| | | NWDDYWGQGTTVTVSSGGGGSGGGGSGGGGSGGGGSEVVLTQSP |
| | | ATLSLSPGERATLSCR |
| | | ASKSISKDLAWYQQKPGQAPRLLIYSGSTLQSGIPARFSGSGSGTDFT |
| | | LTISSLEPEDFA |
| | | VYYCQQHNKYPYTFGGGTKVEIKTTTPAPRPPTPAPTIASQPLSLRPE |
| | | ACRPAAGGAVHT |
| | | RGLDFACDIYIWAPLAGTCGVLLLSLVITLYCKRGRKKLLYIFKQPF |
| | | MRPVQTTQEEDGC |
| | | SCRFPEEEEGGCELRVKFSRSADAPAYKQGQNQLYNELNLGRREEY |
| | | DVLDKRRGRDPEMG |
| | | GKPRRKNPQEGLYNELQKDKMAEAYSEIGMKGERRRGKGHDGLY |
| | | QGLSTATKDTYDALHM |
| | | QALPPR |
| hzCAR123- | 209 | MALPVTALLLPLALLLHAARPEVQLVESGGGLVQPGGSLRLSCAAS |
| 26 | | GYTFTSYWMNWVRQ |
| scFv | | APGKGLVWVSRIDPYDSETHYNQKFKDRFTISVDKAKSTAYLQMNS |
| | | LRAEDTAVYYCARG |
| | | NWDDYWGQGTTVTVSSGGGGSGGGGSGGGGSGGGGSEVVLTQSP |
| | | ATLSLSPGERATLSCR |
| | | ASKSISKDLAWYQQKPGQAPRLLIYSGSTLQSGIPARFSGSGSGTDFT |
| | | LTISSLEPEDFA |
| | | VYYCQQHNKYPYTFGGGTKVEIK |
| hzCAR123- | 268 | EVQLVESGGGLVQPGGSLRLSCAASGYTFTSYWMNWVRQAPGKG |
| 26 VH | | LVWVSRIDPYDSETHYNQKFKDRFTISVDKAKSTAYLQMNSLRAED |
| | | TAVYYCARGNWDDYWGQGTTVTVSS |
| hzCAR123- | 327 | EVVLTQSPATLSLSPGERATLSCRASKSISKDLAWYQQKPGQAPRLL |
| 26 VL | | IYSGSTLQSGIPARFSGSGSGTDFTLTISSLEPEDFAVYYCQQHNKYP |
| | | YTFGGGTKVEIK |
| hzCAR123- | 92 | ATGGCCCTCCCTGTCACCGCCCTGCTGCTTCCGCTGGCTCTTCTG |
| 27 NT | | CTCCACGCCGCTCGGCCCGAAGTGCAGCTCGTCGAGAGCGGAGG |
| | | GGGACTGGTGCAGCCCGGAGGAAGCCTGAGGCTGTCCTGCGCTG |
| | | CCTCCGGCTACACCTTCACCTCCTACTGGATGAACTGGGTCAGAC |
| | | AGGCACCTGGAAAGGGACTGGTCTGGGTGTCGCGCATTGACCCC |
| | | TACGACTCCGAAACCCATTACAATCAGAAATTCAAGGACCGCTT |
| | | CACCATCTCCGTGGACAAAGCCAAGAGCACCGCGTACCTCCAAA |
| | | TGAACTCCCTGCGCGCTGAGGATACAGCAGTGTACTATTGCGCC |
| | | CGGGGAAACTGGGATGATTACTGGGGCCAGGGAACTACTGTGAC |
| | | TGTGTCATCCGGGGGTGGCGGTAGCGGAGGAGGGGGCTCCGGCG |
| | | GCGGCGGCTCAGGGGGCGGAGGAAGCGACGTCGTGATGACCCA |
| | | GTCACCGGCATTCCTGTCCGTGACTCCCGGAGAAAAGGTCACGA |
| | | TTACTTGCCGGGCGTCCAAGAGCATCTCCAAGGACCTCGCCTGGT |
| | | ACCAACAGAAGCCGGACCAGGCCCCTAAGCTGTTGATCTACTCG |
| | | GGGTCCACCCTTCAATCGGGAGTGCCATCGCGGTTTAGCGGTTCG |
| | | GGTTCTGGGACCGACTTCACTTTCACCATCTCCTCACTGGAAGCC |
| | | GAGGATGCCGCCACTTACTACTGTCAGCAGCACAACAAGTATCC |
| | | GTACACCTTCGGAGGCGGTACCAAAGTGGAGATCAAGACCACTA |
| | | CCCCAGCACCGAGGCCACCCACCCCGGCTCCTACCATCGCCTCCC |
| | | AGCCTCTGTCCCTGCGTCCGGAggcatgtagacccgcagctggtggggccgtgcata |
| | | cccggggtcttgacttcgcctgcgatatctacatttgggcccctctggctggtacttgcggggtcctgctgcttt |
| | | cactcgtgatcactctttactgtaagcgcggtcggaagaagctgctgtacatctttaagcaacccttcatgagg |
| | | cctgtgcagactactcaagaggaggacggctgttcatgccggttcccagaggaggaggaaggcggctgc |
| | | gaactgcgcgtgaaattcagccgcagcgcagatgctccagcctacaagcaggggcagaaccagctctac |
| | | aacgaactcaatcttggtcggagagaggagtacgacgtgctggacaagcggagaggacgggacccaga |
| | | aatgggcgggaagccgcgcagaaagaatccccaagagggcctgtacaacgagctccaaaaggataaga |
| | | tggcagaagcctatagcgagattggtatgaaaggggaacgcagaagaggcaaaggccacgacggactgt |
| | | accagggactcagcaccgccaccaaggacacctatgacgctcttcacatgcaggccctgccgcctcgg |
| hzCAR123- | 151 | MALPVTALLLPLALLLHAARPEVQLVESGGGLVQPGGSLRLSCAAS |
| 27 AA | | GYTFTSYWMNWVRQ |
| | | APGKGLVWVSRIDPYDSETHYNQKFKDRFTISVDKAKSTAYLQMNS |
| | | LRAEDTAVYYCARG |
| | | NWDDYWGQGTTVTVSSGGGGSGGGGSGGGGSGGGGSDVVMTQS |
| | | PAFLSVTPGEKVTITCR |
| | | ASKSISKDLAWYQQKPDQAPKLLIYSGSTLQSGVPSRFSGSGSGTDF |
| | | TFTISSLEAEDAA |
| | | TYYCQQHNKYPYTFGGGTKVEIKTTTPAPRPPTPAPTIASQPLSLRPE |
| | | ACRPAAGGAVHT |
| | | RGLDFACDIYIWAPLAGTCGVLLLSLVITLYCKRGRKKLLYIFKQPF |
| | | MRPVQTTQEEDGC |
| | | SCRFPEEEEGGCELRVKFSRSADAPAYKQGQNQLYNELNLGRREEY |
| | | DVLDKRRGRDPEMG |
| | | GKPRRKNPQEGLYNELQKDKMAEAYSEIGMKGERRRGKGHDGLY |
| | | QGLSTATKDTYDALHM |
| | | QALPPR |
| hzCAR123- | 210 | MALPVTALLLPLALLLHAARPEVQLVESGGGLVQPGGSLRLSCAAS |
| 27 | | GYTFTSYWMNWVRQ |
| scFv | | APGKGLVWVSRIDPYDSETHYNQKFKDRFTISVDKAKSTAYLQMNS |
| | | LRAEDTAVYYCARG |
| | | NWDDYWGQGTTVTVSSGGGGSGGGGSGGGGSGGGGSDVVMTQS |
| | | PAFLSVTPGEKVTITCR |
| | | ASKSISKDLAWYQQKPDQAPKLLIYSGSTLQSGVPSRFSGSGSGTDF |
| | | TFTISSLEAEDAA |
| | | TYYCQQHNKYPYTFGGGTKVEIK |
| hzCAR123- | 269 | EVQLVESGGGLVQPGGSLRLSCAASGYTFTSYWMNWVRQAPGKG |
| 27 VH | | LVWVSRIDPYDSETHYNQKFKDRFTISVDKAKSTAYLQMNSLRAED |
| | | TAVYYCARGNWDDYWGQGTTVTVSS |
| hzCAR123- | 328 | DVVMTQSPAFLSVTPGEKVTITCRASKSISKDLAWYQQKPDQAPKL |
| 27 VL | | LIYSGSTLQSGVPSRFSGSGSGTDFTFTISSLEAEDAATYYCQQHNKY |
| | | PYTFGGGTKVEIK |
| hzCAR123- | 93 | ATGGCCCTCCCTGTCACCGCCCTGCTGCTTCCGCTGGCTCTTCTG |
| 28 NT | | CTCCACGCCGCTCGGCCCGAAGTGCAGCTCGTCGAGAGCGGAGG |
| | | GGGACTGGTGCAGCCCGGAGGAAGCCTGAGGCTGTCCTGCGCTG |
| | | CCTCCGGCTACACCTTCACCTCCTACTGGATGAACTGGGTCAGAC |
| | | AGGCACCTGGAAAGGGACTGGTCTGGGTGTCGCGCATTGACCCC |
| | | TACGACTCCGAAACCCATTACAATCAGAAATTCAAGGACCGCTT |
| | | CACCATCTCCGTGGACAAAGCCAAGAGCACCGCGTACCTCCAAA |
| | | TGAACTCCCTGCGCGCTGAGGATACAGCAGTGTACTATTGCGCC |
| | | CGGGGAAACTGGGATGATTACTGGGGCCAGGGAACTACTGTGAC |
| | | TGTGTCATCCGGGGGTGGCGGTAGCGGAGGAGGGGGCTCCGGCG |
| | | GCGGCGGCTCAGGGGGCGGAGGAAGCGACGTGGTCATGACTCA |
| | | GTCCCCGGACTCACTCGCGGTGTCGCTTGGAGAGAGAGCGACCA |
| | | TCAACTGTCGGGCCTCAAAGAGCATCAGCAAGGACCTGGCCTGG |
| | | TACCAGCAGAAGCCGGGACAGCCGCCAAAGCTGCTGATCTACTC |
| | | CGGGTCCACCTTGCAATCTGGTGTCCCTGACCGGTTCTCCGGTTC |
| | | CGGGTCGGGTACCGACTTCACGCTCACTATTTCGTCGCTGCAAGC |
| | | CGAAGATGTGGCCGTGTACTATTGCCAACAGCACAACAAGTACC |
| | | CCTACACTTTTGGCGGAGGCACCAAGGTGGAAATCAAGACCACT |
| | | ACCCCAGCACCGAGGCCACCCACCCCGGCTCCTACCATCGCCTC |
| | | CCAGCCTCTGTCCCTGCGTCCGGAggcatgtagacccgcagctggtggggccgtgc |
| | | atacccggggtcttgacttcgcctgcgatatctacatttgggcccctctggctggtacttgcggggtcctgctg |
| | | ctttcactcgtgatcactctttactgtaagcgcggtcggaagaagctgctgtacatctttaagcaacccttcatg |
| | | aggcctgtgcagactactcaagaggaggacggctgttcatgccggttcccagaggaggaggaaggcggc |
| | | tgcgaactgcgcgtgaaattcagccgcagcgcagatgctccagcctacaagcaggggcagaaccagctct |
| | | acaacgaactcaatcttggtcggagagaggagtacgacgtgctggacaagcggagaggacgggaccca |
| | | gaaatgggcgggaagccgcgcagaaagaatccccaagagggcctgtacaacgagctccaaaaggataa |
| | | gatggcagaagcctatagcgagattggtatgaaaggggaacgcagaagaggcaaaggccacgacggac |
| | | tgtaccagggactcagcaccgccaccaaggacacctatgacgctcttcacatgcaggccctgccgcctcgg |
| hzCAR123- | 152 | MALPVTALLLPLALLLHAARPEVQLVESGGGLVQPGGSLRLSCAAS |
| 28 AA | | GYTFTSYWMNWVRQ |
| | | APGKGLVWVSRIDPYDSETHYNQKFKDRFTISVDKAKSTAYLQMNS |
| | | LRAEDTAVYYCARG |
| | | NWDDYWGQGTTVTVSSGGGGSGGGGSGGGGSGGGGSDVVMTQS |
| | | PDSLAVSLGERATINCR |
| | | ASKSISKDLAWYQQKPGQPPKLLIYSGSTLQSGVPDRFSGSGSGTDF |
| | | TLTISSLQAEDVA |
| | | VYYCQQHNKYPYTFGGGTKVEIKTTTPAPRPPTPAPTIASQPLSLRPE |
| | | ACRPAAGGAVHT |
| | | RGLDFACDIYIWAPLAGTCGVLLLSLVITLYCKRGRKKLLYIFKQPF |
| | | MRPVQTTQEEDGC |
| | | SCRFPEEEEGGCELRVKFSRSADAPAYKQGQNQLYNELNLGRREEY |
| | | DVLDKRRGRDPEMG |
| | | GKPRRKNPQEGLYNELQKDKMAEAYSEIGMKGERRRGKGHDGLY |
| | | QGLSTATKDTYDALHM |
| | | QALPPR |
| hzCAR123- | 211 | MALPVTALLLPLALLLHAARPEVQLVESGGGLVQPGGSLRLSCAAS |
| 28 | | GYTFTSYWMNWVRQ |
| scFv | | APGKGLVWVSRIDPYDSETHYNQKFKDRFTISVDKAKSTAYLQMNS |
| | | LRAEDTAVYYCARG |
| | | NWDDYWGQGTTVTVSSGGGGSGGGGSGGGGSGGGGSDVVMTQS |
| | | PDSLAVSLGERATINCR |
| | | ASKSISKDLAWYQQKPGQPPKLLIYSGSTLQSGVPDRFSGSGSGTDF |
| | | TLTISSLQAEDVA |
| | | VYYCQQHNKYPYTFGGGTKVEIK |
| hzCAR123- | 270 | EVQLVESGGGLVQPGGSLRLSCAASGYTFTSYWMNWVRQAPGKG |
| 28 VH | | LVWVSRIDPYDSETHYNQKFKDRFTISVDKAKSTAYLQMNSLRAED |
| | | TAVYYCARGNWDDYWGQGTTVTVSS |
| hzCAR123- | 329 | DVVMTQSPDSLAVSLGERATINCRASKSISKDLAWYQQKPGQPPKL |
| 28 VL | | LIYSGSTLQSGVPDRFSGSGSGTDFTLTISSLQAEDVAVYYCQQHNK |
| | | YPYTFGGGTKVEIK |
| hzCAR123- | 94 | ATGGCCCTCCCTGTCACCGCCCTGCTGCTTCCGCTGGCTCTTCTG |
| 29 NT | | CTCCACGCCGCTCGGCCCGACGTGCAGCTCACCCAGTCGCCCTCA |
| | | TTTCTGTCGGCCTCAGTGGGAGACAGAGTGACCATTACTTGTCGG |
| | | GCCTCCAAGAGCATCTCCAAGGACCTGGCCTGGTATCAGCAGAA |
| | | GCCAGGAAAGGCGCCTAAGTTGCTCATCTACTCGGGGTCGACCC |
| | | TGCAATCTGGCGTGCCGTCCCGGTTCTCCGGTTCGGGAAGCGGTA |
| | | CCGAATTCACCCTTACTATCTCCTCCCTGCAACCGGAGGACTTCG |
| | | CCACCTACTACTGCCAACAGCACAACAAGTACCCGTACACTTTC |
| | | GGGGGTGGCACGAAGGTCGAAATCAAGGGGGGTGGCGGTAGCG |
| | | GAGGAGGGGGCTCCGGCGGCGGCGGCTCAGGGGGCGGAGGAAG |
| | | CGAAGTGCAGCTCGTCGAGAGCGGAGGGGGACTGGTGCAGCCC |
| | | GGAGGAAGCCTGAGGCTGTCCTGCGCTGCCTCCGGCTACACCTT |
| | | CACCTCCTACTGGATGAACTGGGTCAGACAGGCACCTGGAAAGG |
| | | GACTGGTCTGGGTGTCGCGCATTGACCCCTACGACTCCGAAACC |
| | | CATTACAATCAGAAATTCAAGGACCGCTTCACCATCTCCGTGGA |
| | | CAAAGCCAAGAGCACCGCGTACCTCCAAATGAACTCCCTGCGCG |
| | | CTGAGGATACAGCAGTGTACTATTGCGCCCGGGGAAACTGGGAT |
| | | GATTACTGGGGCCAGGGAACTACTGTGACTGTGTCATCCACCAC |
| | | TACCCCAGCACCGAGGCCACCCACCCCGGCTCCTACCATCGCCTC |
| | | CCAGCCTCTGTCCCTGCGTCCGGAggcatgtagacccgcagctggtggggccgtgc |
| | | atacccggggtcttgacttcgcctgcgatatctacatttgggcccctctggctggtacttgcggggtcctgctg |
| | | ctttcactcgtgatcactctttactgtaagcgcggtcggaagaagctgctgtacatctttaagcaacccttcatg |
| | | aggcctgtgcagactactcaagaggaggacggctgttcatgccggttcccagaggaggaggaaggcggc |
| | | tgcgaactgcgcgtgaaattcagccgcagcgcagatgctccagcctacaagcaggggcagaaccagctct |
| | | acaacgaactcaatcttggtcggagagaggagtacgacgtgctggacaagcggagaggacgggaccca |
| | | gaaatgggcgggaagccgcgcagaaagaatccccaagagggcctgtacaacgagctccaaaaggataa |
| | | gatggcagaagcctatagcgagattggtatgaaaggggaacgcagaagaggcaaaggccacgacggac |
| | | tgtaccagggactcagcaccgccaccaaggacacctatgacgctcttcacatgcaggccctgccgcctcgg |
| hzCAR123- | 153 | MALPVTALLLPLALLLHAARPDVQLTQSPSFLSASVGDRVTITCRAS |
| 29 AA | | KSISKDLAWYQQK |
| | | PGKAPKLLIYSGSTLQSGVPSRFSGSGSGTEFTLTISSLQPEDFATYYC |
| | | QQHNKYPYTFG |
| | | GGTKVEIKGGGGSGGGGSGGGGSGGGGSEVQLVESGGGLVQPGGS |
| | | LRLSCAASGYTFTSY |
| | | WMNWVRQAPGKGLVWVSRIDPYDSETHYNQKFKDRFTISVDKAK |
| | | STAYLQMNSLRAEDTA |
| | | VYYCARGNWDDYWGQGTTVTVSSTTTPAPRPPTPAPTIASQPLSLR |
| | | PEACRPAAGGAVHT |
| | | RGLDFACDIYIWAPLAGTCGVLLLSLVITLYCKRGRKKLLYIFKQPF |
| | | MRPVQTTQEEDGC |
| | | SCRFPEEEEGGCELRVKFSRSADAPAYKQGQNQLYNELNLGRREEY |
| | | DVLDKRRGRDPEMG |
| | | GKPRRKNPQEGLYNELQKDKMAEAYSEIGMKGERRRGKGHDGLY |
| | | QGLSTATKDTYDALHM |
| | | QALPPR |
| hzCAR123- | 212 | MALPVTALLLPLALLLHAARPDVQLTQSPSFLSASVGDRVTITCRAS |
| 29 | | KSISKDLAWYQQK |
| scFv | | PGKAPKLLIYSGSTLQSGVPSRFSGSGSGTEFTLTISSLQPEDFATYYC |
| | | QQHNKYPYTFG |
| | | GGTKVEIKGGGGSGGGGSGGGGSGGGGSEVQLVESGGGLVQPGGS |
| | | LRLSCAASGYTFTSY |
| | | WMNWVRQAPGKGLVWVSRIDPYDSETHYNQKFKDRFTISVDKAK |
| | | STAYLQMNSLRAEDTA |
| | | VYYCARGNWDDYWGQGTTVTVSS |
| hzCAR123- | 271 | EVQLVESGGGLVQPGGSLRLSCAASGYTFTSYWMNWVRQAPGKG |
| 29 VH | | LVWVSRIDPYDSETHYNQKFKDRFTISVDKAKSTAYLQMNSLRAED |
| | | TAVYYCARGNWDDYWGQGTTVTVSS |
| hzCAR123- | 330 | DVQLTQSPSFLSASVGDRVTITCRASKSISKDLAWYQQKPGKAPKLL |
| 29 VL | | IYSGSTLQSGVPSRFSGSGSGTEFTLTISSLQPEDFATYYCQQHNKYP |
| | | YTFGGGTKVEIK |
| hzCAR123- | 95 | ATGGCCCTCCCTGTCACCGCCCTGCTGCTTCCGCTGGCTCTTCTG |
| 30 NT | | CTCCACGCCGCTCGGCCCGAAGTGGTGCTGACCCAGTCGCCCGC |
| | | AACCCTCTCTCTGTCGCCGGGAGAACGCGCCACTCTTTCCTGTCG |
| | | GGCGTCCAAGAGCATCTCAAAGGACCTCGCCTGGTACCAGCAGA |
| | | AGCCTGGTCAAGCCCCGCGGCTGCTGATCTACTCCGGCTCCACGC |
| | | TGCAATCAGGAATCCCAGCCAGATTTTCCGGTTCGGGGTCGGGG |
| | | ACTGACTTCACCTTGACCATTAGCTCGCTGGAACCTGAGGACTTC |
| | | GCCGTGTATTACTGCCAGCAGCACAACAAGTACCCGTACACCTT |
| | | CGGAGGCGGTACTAAGGTCGAGATCAAGGGGGGTGGCGGTAGC |
| | | GGAGGAGGGGGCTCCGGCGGCGGCGGCTCAGGGGGCGGAGGAA |
| | | GCGAAGTGCAGCTCGTCGAGAGCGGAGGGGGACTGGTGCAGCC |
| | | CGGAGGAAGCCTGAGGCTGTCCTGCGCTGCCTCCGGCTACACCT |
| | | TCACCTCCTACTGGATGAACTGGGTCAGACAGGCACCTGGAAAG |
| | | GGACTGGTCTGGGTGTCGCGCATTGACCCCTACGACTCCGAAAC |
| | | CCATTACAATCAGAAATTCAAGGACCGCTTCACCATCTCCGTGG |
| | | ACAAAGCCAAGAGCACCGCGTACCTCCAAATGAACTCCCTGCGC |
| | | GCTGAGGATACAGCAGTGTACTATTGCGCCCGGGGAAACTGGGA |
| | | TGATTACTGGGGCCAGGGAACTACTGTGACTGTGTCATCCACCA |
| | | CTACCCCAGCACCGAGGCCACCCACCCCGGCTCCTACCATCGCCT |
| | | CCCAGCCTCTGTCCCTGCGTCCGGAggcatgtagacccgcagctggtggggccgtg |
| | | catacccggggtcttgacttcgcctgcgatatctacatttgggcccctctggctggtacttgcggggtcctgct |
| | | gctttcactcgtgatcactctttactgtaagcgcggtcggaagaagctgctgtacatctttaagcaacccttcat |
| | | gaggcctgtgcagactactcaagaggaggacggctgttcatgccggttcccagaggaggaggaaggcgg |
| | | ctgcgaactgcgcgtgaaattcagccgcagcgcagatgctccagcctacaagcaggggcagaaccagct |
| | | ctacaacgaactcaatcttggtcggagagaggagtacgacgtgctggacaagcggagaggacgggaccc |
| | | agaaatgggcgggaagccgcgcagaaagaatccccaagagggcctgtacaacgagctccaaaaggata |
| | | agatggcagaagcctatagcgagattggtatgaaaggggaacgcagaagaggcaaaggccacgacgga |
| | | ctgtaccagggactcagcaccgccaccaaggacacctatgacgctcttcacatgcaggccctgccgcctcgg |
| hzCAR123- | 154 | MALPVTALLLPLALLLHAARPEVVLTQSPATLSLSPGERATLSCRAS |
| 30 AA | | KSISKDLAWYQQK |
| | | PGQAPRLLIYSGSTLQSGIPARFSGSGSGTDFTLTISSLEPEDFAVYYC |
| | | QQHNKYPYTFG |
| | | GGTKVEIKGGGGSGGGGSGGGGSGGGGSEVQLVESGGGLVQPGGS |
| | | LRLSCAASGYTFTSY |
| | | WMNWVRQAPGKGLVWVSRIDPYDSETHYNQKFKDRFTISVDKAK |
| | | STAYLQMNSLRAEDTA |
| | | VYYCARGNWDDYWGQGTTVTVSSTTTPAPRPPTPAPTIASQPLSLR |
| | | PEACRPAAGGAVHT |
| | | RGLDFACDIYIWAPLAGTCGVLLLSLVITLYCKRGRKKLLYIFKQPF |
| | | MRPVQTTQEEDGC |
| | | SCRFPEEEEGGCELRVKFSRSADAPAYKQGQNQLYNELNLGRREEY |
| | | DVLDKRRGRDPEMG |
| | | GKPRRKNPQEGLYNELQKDKMAEAYSEIGMKGERRRGKGHDGLY |
| | | QGLSTATKDTYDALHM |
| | | QALPPR |
| hzCAR123- | 213 | MALPVTALLLPLALLLHAARPEVVLTQSPATLSLSPGERATLSCRAS |
| 30 | | KSISKDLAWYQQK |
| scFv | | PGQAPRLLIYSGSTLQSGIPARFSGSGSGTDFTLTISSLEPEDFAVYYC |
| | | QQHNKYPYTFG |
| | | GGTKVEIKGGGGSGGGGSGGGGSGGGGSEVQLVESGGGLVQPGGS |
| | | LRLSCAASGYTFTSY |
| | | WMNWVRQAPGKGLVWVSRIDPYDSETHYNQKFKDRFTISVDKAK |
| | | STAYLQMNSLRAEDTA |
| | | VYYCARGNWDDYWGQGTTVTVSS |
| hzCAR123- | 272 | EVQLVESGGGLVQPGGSLRLSCAASGYTFTSYWMNWVRQAPGKG |
| 30 VH | | LVWVSRIDPYDSETHYNQKFKDRFTISVDKAKSTAYLQMNSLRAED |
| | | TAVYYCARGNWDDYWGQGTTVTVSS |
| hzCAR123- | 331 | EVVLTQSPATLSLSPGERATLSCRASKSISKDLAWYQQKPGQAPRLL |
| 30 VL | | IYSGSTLQSGIPARFSGSGSGTDFTLTISSLEPEDFAVYYCQQHNKYP |
| | | YTFGGGTKVEIK |
| hzCAR123- | 96 | ATGGCCCTCCCTGTCACCGCCCTGCTGCTTCCGCTGGCTCTTCTG |
| 31 NT | | CTCCACGCCGCTCGGCCCGACGTCGTGATGACCCAGTCACCGGC |
| | | ATTCCTGTCCGTGACTCCCGGAGAAAAGGTCACGATTACTTGCCG |
| | | GGCGTCCAAGAGCATCTCCAAGGACCTCGCCTGGTACCAACAGA |
| | | AGCCGGACCAGGCCCCTAAGCTGTTGATCTACTCGGGGTCCACC |
| | | CTTCAATCGGGAGTGCCATCGCGGTTTAGCGGTTCGGGTTCTGGG |
| | | ACCGACTTCACTTTCACCATCTCCTCACTGGAAGCCGAGGATGCC |
| | | GCCACTTACTACTGTCAGCAGCACAACAAGTATCCGTACACCTTC |
| | | GGAGGCGGTACCAAAGTGGAGATCAAGGGGGGTGGCGGTAGCG |
| | | GAGGAGGGGGCTCCGGCGGCGGCGGCTCAGGGGGCGGAGGAAG |
| | | CGAAGTGCAGCTCGTCGAGAGCGGAGGGGGACTGGTGCAGCCC |
| | | GGAGGAAGCCTGAGGCTGTCCTGCGCTGCCTCCGGCTACACCTT |
| | | CACCTCCTACTGGATGAACTGGGTCAGACAGGCACCTGGAAAGG |
| | | GACTGGTCTGGGTGTCGCGCATTGACCCCTACGACTCCGAAACC |
| | | CATTACAATCAGAAATTCAAGGACCGCTTCACCATCTCCGTGGA |
| | | CAAAGCCAAGAGCACCGCGTACCTCCAAATGAACTCCCTGCGCG |
| | | CTGAGGATACAGCAGTGTACTATTGCGCCCGGGGAAACTGGGAT |
| | | GATTACTGGGGCCAGGGAACTACTGTGACTGTGTCATCCACCAC |
| | | TACCCCAGCACCGAGGCCACCCACCCCGGCTCCTACCATCGCCTC |
| | | CCAGCCTCTGTCCCTGCGTCCGGAggcatgtagacccgcagctggtggggccgtgc |
| | | atacccggggtcttgacttcgcctgcgatatctacatttgggcccctctggctggtacttgcggggtcctgctg |
| | | ctttcactcgtgatcactctttactgtaagcgcggtcggaagaagctgctgtacatctttaagcaacccttcatg |
| | | aggcctgtgcagactactcaagaggaggacggctgttcatgccggttcccagaggaggaggaaggcggc |
| | | tgcgaactgcgcgtgaaattcagccgcagcgcagatgctccagcctacaagcaggggcagaaccagctct |
| | | acaacgaactcaatcttggtcggagagaggagtacgacgtgctggacaagcggagaggacgggaccca |
| | | gaaatgggcgggaagccgcgcagaaagaatccccaagagggcctgtacaacgagctccaaaaggataa |
| | | gatggcagaagcctatagcgagattggtatgaaaggggaacgcagaagaggcaaaggccacgacggac |
| | | tgtaccagggactcagcaccgccaccaaggacacctatgacgctcttcacatgcaggccctgccgcctcgg |
| hzCAR123- | 155 | MALPVTALLLPLALLLHAARPDVVMTQSPAFLSVTPGEKVTITCRAS |
| 31 AA | | KSISKDLAWYQQK |
| | | PDQAPKLLIYSGSTLQSGVPSRFSGSGSGTDFTFTISSLEAEDAATYY |
| | | CQQHNKYPYTFG |
| | | GGTKVEIKGGGGSGGGGSGGGGSGGGGSEVQLVESGGGLVQPGGS |
| | | LRLSCAASGYTFTSY |
| | | WMNWVRQAPGKGLVWVSRIDPYDSETHYNQKFKDRFTISVDKAK |
| | | STAYLQMNSLRAEDTA |
| | | VYYCARGNWDDYWGQGTTVTVSSTTTPAPRPPTPAPTIASQPLSLR |
| | | PEACRPAAGGAVHT |
| | | RGLDFACDIYIWAPLAGTCGVLLLSLVITLYCKRGRKKLLYIFKQPF |
| | | MRPVQTTQEEDGC |
| | | SCRFPEEEEGGCELRVKFSRSADAPAYKQGQNQLYNELNLGRREEY |
| | | DVLDKRRGRDPEMG |
| | | GKPRRKNPQEGLYNELQKDKMAEAYSEIGMKGERRRGKGHDGLY |
| | | QGLSTATKDTYDALHM |
| | | QALPPR |
| hzCAR123- | 214 | MALPVTALLLPLALLLHAARPDVVMTQSPAFLSVTPGEKVTITCRAS |
| 31 | | KSISKDLAWYQQK |
| scFv | | PDQAPKLLIYSGSTLQSGVPSRFSGSGSGTDFTFTISSLEAEDAATYY |
| | | CQQHNKYPYTFG |
| | | GGTKVEIKGGGGSGGGGSGGGGSGGGGSEVQLVESGGGLVQPGGS |
| | | LRLSCAASGYTFTSY |
| | | WMNWVRQAPGKGLVWVSRIDPYDSETHYNQKFKDRFTISVDKAK |
| | | STAYLQMNSLRAEDTA |
| | | VYYCARGNWDDYWGQGTTVTVSS |
| hzCAR123- | 273 | EVQLVESGGGLVQPGGSLRLSCAASGYTFTSYWMNWVRQAPGKG |
| 31 VH | | LVWVSRIDPYDSETHYNQKFKDRFTISVDKAKSTAYLQMNSLRAED |
| | | TAVYYCARGNWDDYWGQGTTVTVSS |
| hzCAR123- | 332 | DVVMTQSPAFLSVTPGEKVTITCRASKSISKDLAWYQQKPDQAPKL |
| 31 VL | | LIYSGSTLQSGVPSRFSGSGSGTDFTFTISSLEAEDAATYYCQQHNKY |
| | | PYTFGGGTKVEIK |
| hzCAR123- | 97 | ATGGCCCTCCCTGTCACCGCCCTGCTGCTTCCGCTGGCTCTTCTG |
| 32 NT | | CTCCACGCCGCTCGGCCCGACGTGGTCATGACTCAGTCCCCGGA |
| | | CTCACTCGCGGTGTCGCTTGGAGAGAGAGCGACCATCAACTGTC |
| | | GGGCCTCAAAGAGCATCAGCAAGGACCTGGCCTGGTACCAGCAG |
| | | AAGCCGGGACAGCCGCCAAAGCTGCTGATCTACTCCGGGTCCAC |
| | | CTTGCAATCTGGTGTCCCTGACCGGTTCTCCGGTTCCGGGTCGGG |
| | | TACCGACTTCACGCTCACTATTTCGTCGCTGCAAGCCGAAGATGT |
| | | GGCCGTGTACTATTGCCAACAGCACAACAAGTACCCCTACACTTT |
| | | TGGCGGAGGCACCAAGGTGGAAATCAAGGGGGGTGGCGGTAGC |
| | | GGAGGAGGGGGCTCCGGCGGCGGCGGCTCAGGGGGCGGAGGAA |
| | | GCGAAGTGCAGCTCGTCGAGAGCGGAGGGGGACTGGTGCAGCC |
| | | CGGAGGAAGCCTGAGGCTGTCCTGCGCTGCCTCCGGCTACACCT |
| | | TCACCTCCTACTGGATGAACTGGGTCAGACAGGCACCTGGAAAG |
| | | GGACTGGTCTGGGTGTCGCGCATTGACCCCTACGACTCCGAAAC |
| | | CCATTACAATCAGAAATTCAAGGACCGCTTCACCATCTCCGTGG |
| | | ACAAAGCCAAGAGCACCGCGTACCTCCAAATGAACTCCCTGCGC |
| | | GCTGAGGATACAGCAGTGTACTATTGCGCCCGGGGAAACTGGGA |
| | | TGATTACTGGGGCCAGGGAACTACTGTGACTGTGTCATCCACCA |
| | | CTACCCCAGCACCGAGGCCACCCACCCCGGCTCCTACCATCGCCT |
| | | CCCAGCCTCTGTCCCTGCGTCCGGAggcatgtagacccgcagctggtggggccgtg |
| | | catacccggggtcttgacttcgcctgcgatatctacatttgggcccctctggctggtacttgcggggtcctgct |
| | | gctttcactcgtgatcactctttactgtaagcgcggtcggaagaagctgctgtacatctttaagcaacccttcat |
| | | gaggcctgtgcagactactcaagaggaggacggctgttcatgccggttcccagaggaggaggaaggcgg |
| | | ctgcgaactgcgcgtgaaattcagccgcagcgcagatgctccagcctacaagcaggggcagaaccagct |
| | | ctacaacgaactcaatcttggtcggagagaggagtacgacgtgctggacaagcggagaggacgggaccc |
| | | agaaatgggcgggaagccgcgcagaaagaatccccaagagggcctgtacaacgagctccaaaaggata |
| | | agatggcagaagcctatagcgagattggtatgaaaggggaacgcagaagaggcaaaggccacgacgga |
| | | ctgtaccagggactcagcaccgccaccaaggacacctatgacgctcttcacatgcaggccctgccgcctcgg |
| hzCAR123- | 156 | MALPVTALLLPLALLLHAARPDVVMTQSPDSLAVSLGERATINCRA |
| 32 AA | | SKSISKDLAWYQQK |
| | | PGQPPKLLIYSGSTLQSGVPDRFSGSGSGTDFTLTISSLQAEDVAVYY |
| | | CQQHNKYPYTFG |
| | | GGTKVEIKGGGGSGGGGSGGGGSGGGGSEVQLVESGGGLVQPGGS |
| | | LRLSCAASGYTFTSY |
| | | WMNWVRQAPGKGLVWVSRIDPYDSETHYNQKFKDRFTISVDKAK |
| | | STAYLQMNSLRAEDTA |
| | | VYYCARGNWDDYWGQGTTVTVSSTTTPAPRPPTPAPTIASQPLSLR |
| | | PEACRPAAGGAVHT |
| | | RGLDFACDIYIWAPLAGTCGVLLLSLVITLYCKRGRKKLLYIFKQPF |
| | | MRPVQTTQEEDGC |
| | | SCRFPEEEEGGCELRVKFSRSADAPAYKQGQNQLYNELNLGRREEY |
| | | DVLDKRRGRDPEMG |
| | | GKPRRKNPQEGLYNELQKDKMAEAYSEIGMKGERRRGKGHDGLY |
| | | QGLSTATKDTYDALHM |
| | | QALPPR |
| hzCAR123- | 215 | MALPVTALLLPLALLLHAARPDVVMTQSPDSLAVSLGERATINCRA |
| 32 | | SKSISKDLAWYQQK |
| scFv | | PGQPPKLLIYSGSTLQSGVPDRFSGSGSGTDFTLTISSLQAEDVAVYY |
| | | CQQHNKYPYTFG |
| | | GGTKVEIKGGGGSGGGGSGGGGSGGGGSEVQLVESGGGLVQPGGS |
| | | LRLSCAASGYTFTSY |
| | | WMNWVRQAPGKGLVWVSRIDPYDSETHYNQKFKDRFTISVDKAK |
| | | STAYLQMNSLRAEDTA |
| | | VYYCARGNWDDYWGQGTTVTVSS |
| hzCAR123- | 274 | EVQLVESGGGLVQPGGSLRLSCAASGYTFTSYWMNWVRQAPGKG |
| 32 VH | | LVWVSRIDPYDSETHYNQKFKDRFTISVDKAKSTAYLQMNSLRAED |
| | | TAVYYCARGNWDDYWGQGTTVTVSS |
| hzCAR123- | 333 | DVVMTQSPDSLAVSLGERATINCRASKSISKDLAWYQQKPGQPPKL |
| 32 VL | | LIYSGSTLQSGVPDRFSGSGSGTDFTLTISSLQAEDVAVYYCQQHNK |
| | | YPYTFGGGTKVEIK |

[0424] In embodiments, a CAR molecule described herein comprises a scFv that specifically binds to CD123, and does not contain a leader sequence, e.g., the amino acid sequence SEQ ID NO: 1. Table 12B below provides amino acid and nucleotide sequences for CD123 scFv sequences that do not contain a leader sequence SEQ ID NO: 1.

TABLE 12B
CD123 CAR scFv sequences

| | SEQ | |
|---|---|---|
| Name | ID | Sequence |
| CAR123-2 | 479 | CAAGTGCAACTCGTCCAAAGCGGAGCGGAAGTCAAGAAACCCG |
| scFv-NT | | GAGCGAGCGTGAAAGTGTCCTGCAAAGCCTCCGGCTACACCTTT |
| | | ACGGGCTACTACATGCACTGGGTGCGCCAGGCACCAGGACAGG |
| | | GTCTTGAATGGATGGGATGGATCAACCCTAATTCGGGCGGAACT |
| | | AACTACGCACAGAAGTTCCAGGGGAGAGTGACTCTGACTCGGG |
| | | ATACCTCCATCTCAACTGTCTACATGGAACTCTCCCGCTTGCGGT |
| | | CAGATGATACGGCAGTGTACTACTGCGCCCGCGACATGAATATC |
| | | CTGGCTACCGTGCCGTTCGACATCTGGGGACAGGGGACTATGGT |
| | | TACTGTCTCATCGGGCGGTGGAGGTTCAGGAGGAGGCGGCTCG |
| | | GGAGGCGGAGGTTCGGACATTCAGATGACCCAGTCCCCATCCTC |
| | | TCTGTCGGCCAGCGTCGGAGATAGGGTGACCATTACCTGTCGGG |
| | | CCTCGCAAAGCATCTCCTCGTACCTCAACTGGTATCAGCAAAAG |
| | | CCGGGAAAGGCGCCTAAGCTGCTGATCTACGCCGCTTCGAGCTT |
| | | GCAAAGCGGGGTGCCATCCAGATTCTCGGGATCAGGCTCAGGA |
| | | ACCGACTTCACCCTGACCGTGAACAGCCTCCAGCCGGAGGACTT |
| | | TGCCACTTACTACTGCCAGCAGGGAGACTCCGTGCCGCTTACTT |
| | | TCGGGGGGGGTACCCGCCTGGAGATCAAG |
| CAR123-2 | 480 | QVQLVQSGAEVKKPGASVKVSCKASGYTFTGYYMHWVRQAPGQ |
| scFv-AA | | GLEWMGWINPNSGGTNYAQKFQGRVTLTRDTSISTVYMELSRLRS |
| | | DDTAVYYCARDMNILATVPFDIWGQGTMVTVSSGGGGSGGGGSG |
| | | GGGSDIQMTQSPSSLSASVGDRVTITCRASQSISSYLNWYQQKPGK |
| | | APKLLIYAASSLQSGVPSRFSGSGSGTDFTLTVNSLQPEDFATYYCQ |
| | | QGDSVPLTFGGGTRLEIK |
| CAR123-2 | 481 | atggccctccctgtcaccgccctgctgcttccgctggctcttctgctccacgccgctcggccccaagtgcaa |
| ORF-free | | ctcgtccaaagcggagcggaagtcaagaaacccggagcgagcgtgaaagtgtcctgcaaagcctccgg |
| NT | | ctacacctttacgggctactacatgcactgggtgcgccaggcaccaggacagggtcttgaatggatggga |
| | | tggatcaaccctaattcgggcggaactaactacgcacagaagttccaggggagagtgactctgactcggg |
| | | atacctccatctcaactgtctacatggaactctcccgcttgcggtcagatgatacggcagtgtactactgcgc |
| | | ccgcgacatgaatatcctggctaccgtgccgttcgacatctggggacaggggactatggttactgtctcatc |
| | | gggcggtggaggttcaggaggaggcggctcgggaggcggaggttcggacattcagatgacccagtcc |
| | | ccatcctctctgtcggccagcgtcggagatagggtgaccattacctgtcgggcctcgcaaagcatctcctc |
| | | gtacctcaactggtatcagcaaaagccgggaaaggcgcctaagctgctgatctacgccgcttcgagcttg |
| | | caaagcggggtgccatccagattctcgggatcaggctcaggaaccgacttcaccctgaccgtgaacagc |
| | | ctccagccggaggactttgccacttactactgccagcagggagactccgtgccgcttactttcggggggg |
| | | gtacccgcctggagatcaagaccactaccccagcaccgaggccacccaccccggctcctaccatcgcct |
| | | cccagcctctgtccctgcgtccggaggcatgtagacccgcagctggtggggccgtgcatacccggggtc |
| | | ttgacttcgcctgcgatatctacatttgggcccctctggctggtacttgcggggtcctgctgctttcactcgtg |
| | | atcactctttactgtaagcgcggtcggaagaagctgctgtacatctttaagcaacccttcatgaggcctgtgc |
| | | agactactcaagaggaggacggctgttcttgccggttcccagaggaggaggaaggcggctgcgaactg |
| | | cgcgtgaaattcagccgcagcgcagacgctccagcctacaagcaggggcagaaccagctctacaacga |
| | | actcaatcttggtcggagagaggagtacgacgtgctggacaagcggagaggacgggacccagaaatgg |
| | | gcgggaagccgcgcagaaagaatccccaagagggcctgtacaacgagctccaaaaggataagatggc |
| | | agaagcctatagcgagattggtatgaaaggggaacgcagaagaggcaaaggccacgacggactgtacc |
| | | agggactcagcaccgccaccaaggacacctatgacgctcttcacatgcaggccctgccgcctcggtaagt |
| | | cgacagctcgctttcttgctgtccaatttctattaaaggttcctttgttccctaagtccaactactaaactggggg |
| | | atattatgaagggccttgagcatctggattctgcctaataaaaaacatttattttcattgctgcgtcgagagctc |
| | | gctttcttgctgtccaatttctattaaaggttcctttgttccctaagtccaactactaaactgggggatattatgaa |
| | | gggccttgagcatctggattctgcctaataaaaaacatttattttcattgctgcctcgacgaattc |
| CAR123-3 | 482 | CAAGTCCAACTCGTTCAATCCGGCGCAGAAGTCAAGAAGCCAG |
| scFv-NT | | GAGCATCAGTGAAAGTGTCCTGCAAAGCCTCAGGCTACATCTTC |
| | | ACGGGATACTACATCCACTGGGTGCGCCAGGCTCCGGGCCAGG |
| | | GCCTTGAGTGGATGGGCTGGATCAACCCTAACTCTGGGGGAACC |
| | | AACTACGCTCAGAAGTTCCAGGGGAGGGTCACTATGACTCGCG |
| | | ATACCTCCATCTCCACTGCGTACATGGAACTCTCGGGACTGAGA |
| | | TCCGACGATCCTGCCGTGTACTACTGCGCCCGGGACATGAACAT |
| | | CTTGGCGACCGTGCCGTTTGACATTTGGGGACAGGGCACCCTCG |
| | | TCACTGTGTCGAGCGGTGGAGGAGGCTCGGGGGGTGGCGGATC |
| | | AGGAGGGGGAGGAAGCGACATCCAGCTGACTCAGAGCCCATCG |
| | | TCGTTGTCCGCGTCGGTGGGGGATAGAGTGACCATTACTTGCCG |
| | | CGCCAGCCAGAGCATCTCATCATATCTGAATTGGTACCAGCAGA |
| | | AGCCCGGAAAGGCCCCAAAACTGCTGATCTACGCTGCAAGCAG |
| | | CCTCCAATCGGGAGTGCCGTCACGGTTCTCCGGGTCCGGTTCGG |
| | | GAACTGACTTTACCCTGACCGTGAATTCGCTGCAACCGGAGGAT |
| | | TTCGCCACGTACTACTGTCAGCAAGGAGACTCCGTGCCGCTGAC |
| | | CTTCGGTGGAGGCACCAAGGTCGAAATCAAG |
| CAR123-3 | 483 | QVQLVQSGAEVKKPGASVKVSCKASGYIFTGYYIHWVRQAPGQGL |
| scFv-AA | | EWMGWINPNSGGTNYAQKFQGRVTMTRDTSISTAYMELSGLRSD |
| | | DPAVYYCARDMNILATVPFDIWGQGTLVTVSSGGGGSGGGGSGG |
| | | GGSDIQLTQSPSSLSASVGDRVTITCRASQSISSYLNWYQQKPGKAP |
| | | KLLIYAASSLQSGVPSRFSGSGSGTDFTLTVNSLQPEDFATYYCQQG |
| | | DSVPLTFGGGTKVEIK |
| CAR123-4 | 484 | CAAGTCCAACTCCAACAGTCAGGCGCAGAAGTGAAAAAGAGCG |
| scFv-NT | | GTGCATCGGTGAAAGTGTCATGCAAAGCCTCGGGCTACACCTTC |
| | | ACTGACTACTATATGCACTGGCTGCGGCAGGCACCGGGACAGG |
| | | GACTTGAGTGGATGGGATGGATCAACCCGAATTCAGGGGACAC |
| | | TAACTACGCGCAGAAGTTCCAGGGGAGAGTGACCCTGACGAGG |
| | | GACACCTCAATTTCGACCGTCTACATGGAATTGTCGCGCCTGAG |
| | | ATCGGACGATACTGCTGTGTACTACTGTGCCCGCGACATGAACA |
| | | TCCTCGCGACTGTGCCTTTTGATATCTGGGGACAGGGGACTATG |
| | | GTCACCGTTTCCTCCGCTTCCGGTGGCGGAGGCTCGGGAGGCCG |
| | | GGCCTCCGGTGGAGGAGGCAGCGACATCCAGATGACTCAGAGC |
| | | CCTTCCTCGCTGAGCGCCTCAGTGGGAGATCGCGTGACCATCAC |
| | | TTGCCGGGCCAGCCAGTCCATTTCGTCCTACCTCAATTGGTACC |
| | | AGCAGAAGCCGGGAAAGGCGCCCAAGCTCTTGATCTACGCTGC |
| | | GAGCTCCCTGCAAAGCGGGGTGCCGAGCCGATTCTCGGGTTCCG |
| | | GCTCGGGAACCGACTTCACTCTGACCATCTCATCCCTGCAACCA |
| | | GAGGACTTTGCCACCTACTACTGCCAACAAGGAGATTCTGTCCC |
| | | ACTGACGTTCGGCGGAGGAACCAAGGTCGAAATCAAG |
| CAR123-4 | 485 | QVQLQQSGAEVKKSGASVKVSCKASGYTFTDYYMHWLRQAPGQ |
| scFv-AA | | GLEWMGWINPNSGDTNYAQKFQGRVTLTRDTSISTVYMELSRLRS |
| | | DDTAVYYCARDMNILATVPFDIWGQGTMVTVSSASGGGGSGGRA |
| | | SGGGGSDIQMTQSPSSLSASVGDRVTITCRASQSISSYLNWYQQKP |
| | | GKAPKLLIYAASSLQSGVPSRFSGSGSGTDFTLTISSLQPEDFATYYC |
| | | QQGDSVPLTFGGGTKVEIK |
| CAR123-1 | 478 | QVQLVQSGAEVKKPGASVKVSCKASGYTFTGYYMHWVRQAPGQ |
| scFv-AA | | GLEWMGWINPNSGGTNYAQKFQGRVTMTRDTSISTAYMELSRLRS |
| | | DDTAVYYCARDMNILATVPFDIWGQGTMVTVSSGGGGSGGGGSG |
| | | GGGSDIQMTQSPSSLSASVGDRVTITCRASQSISTYLNWYQQKPGK |
| | | APNLLIYAAFSLQSGVPSRFSGSGSGTDFTLTINSLQPEDFATYYCQ |
| | | QGDSVPLTFGGGTKLEIK |
| hzCAR123-1 | 556 | QVQLVQSGAEVKKPGASVKVSCKASGYTFTSYWMNWVRQAPGQ |
| scFv | | GLEWMGRIDPYDSETHYNQKFKDRVTMTVDKSTSTAYMELSSLRS |
| | | EDTAVYYCARGNWDDYWGQGTTVTVSSGGGGSGGGGSGGGGSG |
| | | GGGSDVQLTQSPSFLSASVGDRVTITCRASKSISKDLAWYQQKPGK |
| | | APKLLIYSGSTLQSGVPSRFSGSGSGTEFTLTISSLQPEDFATYYCQQ |
| | | HNKYPYTFGGGTKVEIK |
| hzCAR123-2 | 557 | QVQLVQSGAEVKKPGASVKVSCKASGYTFTSYWMNWVRQ |
| scFv | | APGQGLEWMGRIDPYDSETHYNQKFKDRVTMTVDKSTSTAYMEL |
| | | SSLRSEDTAVYYCARG |
| | | NWDDYWGQGTTVTVSSGGGGSGGGGSGGGGSGGGGSEVVLTQSP |
| | | ATLSLSPGERATLSCR |
| | | ASKSISKDLAWYQQKPGQAPRLLIYSGSTLQSGIPARFSGSGSGTDF |
| | | TLTISSLEPEDFA |
| | | VYYCQQHNKYPYTFGGGTKVEIK |
| hzCAR123-3 | 558 | QVQLVQSGAEVKKPGASVKVSCKASGYTFTSYWMNWVRQ |
| scFv | | APGQGLEWMGRIDPYDSETHYNQKFKDRVTMTVDKSTSTAYMEL |
| | | SSLRSEDTAVYYCARG |
| | | NWDDYWGQGTTVTVSSGGGGSGGGGSGGGGSGGGGSDVVMTQS |
| | | PAFLSVTPGEKVTITCR |
| | | ASKSISKDLAWYQQKPDQAPKLLIYSGSTLQSGVPSRFSGSGSGTDF |
| | | TFTISSLEAEDAA |
| | | TYYCQQHNKYPYTFGGGTKVEIK |
| hzCAR123-4 | 559 | QVQLVQSGAEVKKPGASVKVSCKASGYTFTSYWMNWVRQ |
| scFv | | APGQGLEWMGRIDPYDSETHYNQKFKDRVTMTVDKSTSTAYMEL |
| | | SSLRSEDTAVYYCARG |
| | | NWDDYWGQGTTVTVSSGGGGSGGGGSGGGGSGGGGSDVVMTQS |
| | | PDSLAVSLGERATINCR |
| | | ASKSISKDLAWYQQKPGQPPKLLIYSGSTLQSGVPDRFSGSGSGTDF |
| | | TLTISSLQAEDVA |
| | | VYYCQQHNKYPYTFGGGTKVEIK |
| hzCAR123-5 | 560 | DVQLTQSPSFLSASVGDRVTITCRASKSISKDLAWYQQK |
| scFv | | PGKAPKLLIYSGSTLQSGVPSRFSGSGSGTEFTLTISSLQPEDFATYY |
| | | CQQHNKYPYTFG |
| | | GGTKVEIKGGGGSGGGGSGGGGSGGGGSQVQLVQSGAEVKKPGA |
| | | SVKVSCKASGYTFTSY |
| | | WMNWVRQAPGQGLEWMGRIDPYDSETHYNQKFKDRVTMTVDKS |
| | | TSTAYMELSSLRSEDTA |
| | | VYYCARGNWDDYWGQGTTVTVSS |
| hzCAR123-6 | 561 | EVVLTQSPATLSLSPGERATLSCRASKSISKDLAWYQQK |
| scFv | | PGQAPRLLIYSGSTLQSGIPARFSGSGSGTDFTLTISSLEPEDFAVYY |
| | | CQQHNKYPYTFG |
| | | GGTKVEIKGGGGSGGGGSGGGGSGGGGSQVQLVQSGAEVKKPGA |
| | | SVKVSCKASGYTFTSY |
| | | WMNWVRQAPGQGLEWMGRIDPYDSETHYNQKFKDRVTMTVDKS |
| | | TSTAYMELSSLRSEDTA |
| | | VYYCARGNWDDYWGQGTTVTVSS |
| hzCAR123-7 | 562 | DVVMTQSPAFLSVTPGEKVTITCRASKSISKDLAWYQQK |
| scFv | | PDQAPKLLIYSGSTLQSGVPSRFSGSGSGTDFTFTISSLEAEDAATYY |
| | | CQQHNKYPYTFG |
| | | GGTKVEIKGGGGSGGGGSGGGGSGGGGSQVQLVQSGAEVKKPGA |
| | | SVKVSCKASGYTFTSY |
| | | WMNWVRQAPGQGLEWMGRIDPYDSETHYNQKFKDRVTMTVDKS |
| | | TSTAYMELSSLRSEDTA |
| | | VYYCARGNWDDYWGQGTTVTVSS |
| hzCAR123-8 | 563 | DVVMTQSPDSLAVSLGERATINCRASKSISKDLAWYQQK |
| scFv | | PGQPPKLLIYSGSTLQSGVPDRFSGSGSGTDFTLTISSLQAEDVAVY |
| | | YCQQHNKYPYTFG |
| | | GGTKVEIKGGGGSGGGGSGGGGSGGGGSQVQLVQSGAEVKKPGA |
| | | SVKVSCKASGYTFTSY |
| | | WMNWVRQAPGQGLEWMGRIDPYDSETHYNQKFKDRVTMTVDKS |
| | | TSTAYMELSSLRSEDTA |
| | | VYYCARGNWDDYWGQGTTVTVSS |
| hzCAR123-9 | 564 | QVQLVQSGSELKKPGASVKVSCKASGYTFTSYWMNWVRQ |
| scFv | | APGQGLEWMGRIDPYDSETHYNQKFKDRFVFSVDKSVSTAYLQIS |
| | | SLKAEDTAVYYCARG |
| | | NWDDYWGQGTTVTVSSGGGGSGGGGSGGGGSGGGGSDVQLTQS |
| | | PSFLSASVGDRVTITCR |
| | | ASKSISKDLAWYQQKPGKAPKLLIYSGSTLQSGVPSRFSGSGSGTEF |
| | | TLTISSLQPEDFA |
| | | TYYCQQHNKYPYTFGGGTKVEIK |
| hzCAR123- | 565 | QVQLVQSGSELKKPGASVKVSCKASGYTFTSYWMNWVRQ |
| 10 | | APGQGLEWMGRIDPYDSETHYNQKFKDRFVFSVDKSVSTAYLQIS |
| scFv | | SLKAEDTAVYYCARG |
| | | NWDDYWGQGTTVTVSSGGGGSGGGGSGGGGSGGGGSEVVLTQSP |
| | | ATLSLSPGERATLSCR |
| | | ASKSISKDLAWYQQKPGQAPRLLIYSGSTLQSGIPARFSGSGSGTDF |
| | | TLTISSLEPEDFA |
| | | VYYCQQHNKYPYTFGGGTKVEIK |
| hzCAR123- | 566 | QVQLVQSGSELKKPGASVKVSCKASGYTFTSYWMNWVRQ |
| 11 | | APGQGLEWMGRIDPYDSETHYNQKFKDRFVFSVDKSVSTAYLQIS |
| scFv | | SLKAEDTAVYYCARG |
| | | NWDDYWGQGTTVTVSSGGGGSGGGGSGGGGSGGGGSDVVMTQS |
| | | PAFLSVTPGEKVTITCR |
| | | ASKSISKDLAWYQQKPDQAPKLLIYSGSTLQSGVPSRFSGSGSGTDF |
| | | TFTISSLEAEDAA |
| | | TYYCQQHNKYPYTFGGGTKVEIK |
| hzCAR123- | 567 | QVQLVQSGSELKKPGASVKVSCKASGYTFTSYWMNWVRQ |
| 12 | | APGQGLEWMGRIDPYDSETHYNQKFKDRFVFSVDKSVSTAYLQIS |
| scFv | | SLKAEDTAVYYCARG |
| | | NWDDYWGQGTTVTVSSGGGGSGGGGSGGGGSGGGGSDVVMTQS |
| | | PDSLAVSLGERATINCR |
| | | ASKSISKDLAWYQQKPGQPPKLLIYSGSTLQSGVPDRFSGSGSGTDF |
| | | TLTISSLQAEDVA |
| | | VYYCQQHNKYPYTFGGGTKVEIK |
| hzCAR123- | 568 | DVQLTQSPSFLSASVGDRVTITCRASKSISKDLAWYQQK |
| 13 | | PGKAPKLLIYSGSTLQSGVPSRFSGSGSGTEFTLTISSLQPEDFATYY |
| scFv | | CQQHNKYPYTFG |
| | | GGTKVEIKGGGGSGGGGSGGGGSGGGGSQVQLVQSGSELKKPGAS |
| | | VKVSCKASGYTFTSY |
| | | WMNWVRQAPGQGLEWMGRIDPYDSETHYNQKFKDRFVFSVDKS |
| | | VSTAYLQISSLKAEDTA |
| | | VYYCARGNWDDYWGQGTTVTVSS |
| hzCAR123- | 569 | EVVLTQSPATLSLSPGERATLSCRASKSISKDLAWYQQK |
| 14 | | PGQAPRLLIYSGSTLQSGIPARFSGSGSGTDFTLTISSLEPEDFAVYY |
| scFv | | CQQHNKYPYTFG |
| | | GGTKVEIKGGGGSGGGGSGGGGSGGGGSQVQLVQSGSELKKPGAS |
| | | VKVSCKASGYTFTSY |
| | | WMNWVRQAPGQGLEWMGRIDPYDSETHYNQKFKDRFVFSVDKS |
| | | VSTAYLQISSLKAEDTA |
| | | VYYCARGNWDDYWGQGTTVTVSS |
| hzCAR123- | 570 | DVVMTQSPAFLSVTPGEKVTITCRASKSISKDLAWYQQK |
| 15 | | PDQAPKLLIYSGSTLQSGVPSRFSGSGSGTDFTFTISSLEAEDAATYY |
| scFv | | CQQHNKYPYTFG |
| | | GGTKVEIKGGGGSGGGGSGGGGSGGGGSQVQLVQSGSELKKPGAS |
| | | VKVSCKASGYTFTSY |
| | | WMNWVRQAPGQGLEWMGRIDPYDSETHYNQKFKDRFVFSVDKS |
| | | VSTAYLQISSLKAEDTA |
| | | VYYCARGNWDDYWGQGTTVTVSS |
| hzCAR123- | 571 | DVVMTQSPDSLAVSLGERATINCRASKSISKDLAWYQQK |
| 16 | | PGQPPKLLIYSGSTLQSGVPDRFSGSGSGTDFTLTISSLQAEDVAVY |
| scFv | | YCQQHNKYPYTFG |
| | | GGTKVEIKGGGGSGGGGSGGGGSGGGGSQVQLVQSGSELKKPGAS |
| | | VKVSCKASGYTFTSY |
| | | WMNWVRQAPGQGLEWMGRIDPYDSETHYNQKFKDRFVFSVDKS |
| | | VSTAYLQISSLKAEDTA |
| | | VYYCARGNWDDYWGQGTTVTVSS |
| hzCAR123- | 572 | EVQLVQSGAEVKKPGESLRISCKGSGYTFTSYWMNWVRQ |
| 17 | | MPGKGLEWMGRIDPYDSETHYNQKFKDHVTISVDKSISTAYLQWS |
| scFv | | SLKASDTAMYYCARG |
| | | NWDDYWGQGTTVTVSSGGGGSGGGGSGGGGSGGGGSDVQLTQS |
| | | PSFLSASVGDRVTITCR |
| | | ASKSISKDLAWYQQKPGKAPKLLIYSGSTLQSGVPSRFSGSGSGTEF |
| | | TLTISSLQPEDFA |
| | | TYYCQQHNKYPYTFGGGTKVEIK |
| hzCAR123- | 573 | EVQLVQSGAEVKKPGESLRISCKGSGYTFTSYWMNWVRQ |
| 18 | | MPGKGLEWMGRIDPYDSETHYNQKFKDHVTISVDKSISTAYLQWS |
| scFv | | SLKASDTAMYYCARG |
| | | NWDDYWGQGTTVTVSSGGGGSGGGGSGGGGSGGGGSEVVLTQSP |
| | | ATLSLSPGERATLSCR |
| | | ASKSISKDLAWYQQKPGQAPRLLIYSGSTLQSGIPARFSGSGSGTDF |
| | | TLTISSLEPEDFA |
| | | VYYCQQHNKYPYTFGGGTKVEIK |
| hzCAR123- | 574 | EVQLVQSGAEVKKPGESLRISCKGSGYTFTSYWMNWVRQ |
| 19 | | MPGKGLEWMGRIDPYDSETHYNQKFKDHVTISVDKSISTAYLQWS |
| scFv | | SLKASDTAMYYCARG |
| | | NWDDYWGQGTTVTVSSGGGGSGGGGSGGGGSGGGGSDVVMTQS |
| | | PAFLSVTPGEKVTITCR |
| | | ASKSISKDLAWYQQKPDQAPKLLIYSGSTLQSGVPSRFSGSGSGTDF |
| | | TFTISSLEAEDAA |
| | | TYYCQQHNKYPYTFGGGTKVEIK |
| hzCAR123- | 575 | EVQLVQSGAEVKKPGESLRISCKGSGYTFTSYWMNWVRQ |
| 20 | | MPGKGLEWMGRIDPYDSETHYNQKFKDHVTISVDKSISTAYLQWS |
| scFv | | SLKASDTAMYYCARG |
| | | NWDDYWGQGTTVTVSSGGGGSGGGGSGGGGSGGGGSDVVMTQS |
| | | PDSLAVSLGERATINCR |
| | | ASKSISKDLAWYQQKPGQPPKLLIYSGSTLQSGVPDRFSGSGSGTDF |
| | | TLTISSLQAEDVA |
| | | VYYCQQHNKYPYTFGGGTKVEIK |
| hzCAR123- | 576 | DVQLTQSPSFLSASVGDRVTITCRASKSISKDLAWYQQK |
| 21 | | PGKAPKLLIYSGSTLQSGVPSRFSGSGSGTEFTLTISSLQPEDFATYY |
| scFv | | CQQHNKYPYTFG |
| | | GGTKVEIKGGGGSGGGGSGGGGSGGGGSEVQLVQSGAEVKKPGE |
| | | SLRISCKGSGYTFTSY |
| | | WMNWVRQMPGKGLEWMGRIDPYDSETHYNQKFKDHVTISVDKSI |
| | | STAYLQWSSLKASDTA |
| | | MYYCARGNWDDYWGQGTTVTVSS |
| hzCAR123- | 577 | EVVLTQSPATLSLSPGERATLSCRASKSISKDLAWYQQK |
| 22 | | PGQAPRLLIYSGSTLQSGIPARFSGSGSGTDFTLTISSLEPEDFAVYY |
| scFv | | CQQHNKYPYTFG |
| | | GGTKVEIKGGGGSGGGGSGGGGSGGGGSEVQLVQSGAEVKKPGE |
| | | SLRISCKGSGYTFTSY |
| | | WMNWVRQMPGKGLEWMGRIDPYDSETHYNQKFKDHVTISVDKSI |
| | | STAYLQWSSLKASDTA |
| | | MYYCARGNWDDYWGQGTTVTVSS |
| hzCAR123- | 578 | DVVMTQSPAFLSVTPGEKVTITCRASKSISKDLAWYQQK |
| 23 | | PDQAPKLLIYSGSTLQSGVPSRFSGSGSGTDFTFTISSLEAEDAATYY |
| scFv | | CQQHNKYPYTFG |
| | | GGTKVEIKGGGGSGGGGSGGGGSGGGGSEVQLVQSGAEVKKPGE |
| | | SLRISCKGSGYTFTSY |
| | | WMNWVRQMPGKGLEWMGRIDPYDSETHYNQKFKDHVTISVDKSI |
| | | STAYLQWSSLKASDTA |
| | | MYYCARGNWDDYWGQGTTVTVSS |
| hzCAR123- | 579 | DVVMTQSPDSLAVSLGERATINCRASKSISKDLAWYQQK |
| 24 | | PGQPPKLLIYSGSTLQSGVPDRFSGSGSGTDFTLTISSLQAEDVAVY |
| scFv | | YCQQHNKYPYTFG |
| | | GGTKVEIKGGGGSGGGGSGGGGSGGGGSEVQLVQSGAEVKKPGE |
| | | SLRISCKGSGYTFTSY |
| | | WMNWVRQMPGKGLEWMGRIDPYDSETHYNQKFKDHVTISVDKSI |
| | | STAYLQWSSLKASDTA |
| | | MYYCARGNWDDYWGQGTTVTVSS |
| hzCAR123- | 580 | EVQLVESGGGLVQPGGSLRLSCAASGYTFTSYWMNWVRQ |
| 25 | | APGKGLVWVSRIDPYDSETHYNQKFKDRFTISVDKAKSTAYLQMN |
| scFv | | SLRAEDTAVYYCARG |
| | | NWDDYWGQGTTVTVSSGGGGSGGGGSGGGGSGGGGSDVQLTQS |
| | | PSFLSASVGDRVTITCR |
| | | ASKSISKDLAWYQQKPGKAPKLLIYSGSTLQSGVPSRFSGSGSGTEF |
| | | TLTISSLQPEDFA |
| | | TYYCQQHNKYPYTFGGGTKVEIK |
| hzCAR123- | 581 | EVQLVESGGGLVQPGGSLRLSCAASGYTFTSYWMNWVRQ |
| 26 | | APGKGLVWVSRIDPYDSETHYNQKFKDRFTISVDKAKSTAYLQMN |
| scFv | | SLRAEDTAVYYCARG |
| | | NWDDYWGQGTTVTVSSGGGGSGGGGSGGGGSGGGGSEVVLTQSP |
| | | ATLSLSPGERATLSCR |
| | | ASKSISKDLAWYQQKPGQAPRLLIYSGSTLQSGIPARFSGSGSGTDF |
| | | TLTISSLEPEDFA |
| | | VYYCQQHNKYPYTFGGGTKVEIK |
| hzCAR123- | 582 | EVQLVESGGGLVQPGGSLRLSCAASGYTFTSYWMNWVRQ |
| 27 | | APGKGLVWVSRIDPYDSETHYNQKFKDRFTISVDKAKSTAYLQMN |
| scFv | | SLRAEDTAVYYCARG |
| | | NWDDYWGQGTTVTVSSGGGGSGGGGSGGGGSGGGGSDVVMTQS |
| | | PAFLSVTPGEKVTITCR |
| | | ASKSISKDLAWYQQKPDQAPKLLIYSGSTLQSGVPSRFSGSGSGTDF |
| | | TFTISSLEAEDAA |
| | | TYYCQQHNKYPYTFGGGTKVEIK |
| hzCAR123- | 583 | EVQLVESGGGLVQPGGSLRLSCAASGYTFTSYWMNWVRQ |
| 28 | | APGKGLVWVSRIDPYDSETHYNQKFKDRFTISVDKAKSTAYLQMN |
| scFv | | SLRAEDTAVYYCARG |
| | | NWDDYWGQGTTVTVSSGGGGSGGGGSGGGGSGGGGSDVVMTQS |
| | | PDSLAVSLGERATINCR |
| | | ASKSISKDLAWYQQKPGQPPKLLIYSGSTLQSGVPDRFSGSGSGTDF |
| | | TLTISSLQAEDVA |
| | | VYYCQQHNKYPYTFGGGTKVEIK |
| hzCAR123- | 584 | DVQLTQSPSFLSASVGDRVTITCRASKSISKDLAWYQQK |
| 29 | | PGKAPKLLIYSGSTLQSGVPSRFSGSGSGTEFTLTISSLQPEDFATYY |
| scFv | | CQQHNKYPYTFG |
| | | GGTKVEIKGGGGSGGGGSGGGGSGGGGSEVQLVESGGGLVQPGG |
| | | SLRLSCAASGYTFTSY |
| | | WMNWVRQAPGKGLVWVSRIDPYDSETHYNQKFKDRFTISVDKAK |
| | | STAYLQMNSLRAEDTA |
| | | VYYCARGNWDDYWGQGTTVTVSS |
| hzCAR123- | 585 | EVVLTQSPATLSLSPGERATLSCRASKSISKDLAWYQQK |
| 30 | | PGQAPRLLIYSGSTLQSGIPARFSGSGSGTDFTLTISSLEPEDFAVYY |
| scFv | | CQQHNKYPYTFG |
| | | GGTKVEIKGGGGSGGGGSGGGGSGGGGSEVQLVESGGGLVQPGG |
| | | SLRLSCAASGYTFTSY |
| | | WMNWVRQAPGKGLVWVSRIDPYDSETHYNQKFKDRFTISVDKAK |
| | | STAYLQMNSLRAEDTA |
| | | VYYCARGNWDDYWGQGTTVTVSS |
| hzCAR123- | 586 | DVVMTQSPAFLSVTPGEKVTITCRASKSISKDLAWYQQK |
| 31 | | PDQAPKLLIYSGSTLQSGVPSRFSGSGSGTDFTFTISSLEAEDAATYY |
| scFv | | CQQHNKYPYTFG |
| | | GGTKVEIKGGGGSGGGGSGGGGSGGGGSEVQLVESGGGLVQPGG |
| | | SLRLSCAASGYTFTSY |
| | | WMNWVRQAPGKGLVWVSRIDPYDSETHYNQKFKDRFTISVDKAK |
| | | STAYLQMNSLRAEDTA |
| | | VYYCARGNWDDYWGQGTTVTVSS |
| hzCAR123- | 587 | DVVMTQSPDSLAVSLGERATINCRASKSISKDLAWYQQK |
| 32 | | PGQPPKLLIYSGSTLQSGVPDRFSGSGSGTDFTLTISSLQAEDVAVY |
| scFv | | YCQQHNKYPYTFG |
| | | GGTKVEIKGGGGSGGGGSGGGGSGGGGSEVQLVESGGGLVQPGG |
| | | SLRLSCAASGYTFTSY |
| | | WMNWVRQAPGKGLVWVSRIDPYDSETHYNQKFKDRFTISVDKAK |
| | | STAYLQMNSLRAEDTA |
| | | VYYCARGNWDDYWGQGTTVTVSS |

### CD19 Antigen Binding Domain

[0425] In one embodiment, the CD19 binding domain comprises one or more (e.g., all three) light chain complementary determining region 1 (LC CDR1), light chain complementary determining region 2 (LC CDR2), and light chain complementary determining region 3 (LC CDR3) of a CD19 binding domain selected from SEQ ID NOS: 710-721, 734-745, 771, 774, 775, 777, or 780 and one or more (e.g., all three) heavy chain complementary determining region 1 (HC CDR1), heavy chain complementary determining region 2 (HC CDR2), and heavy chain complementary determining region 3 (HC CDR3) of a CD19 binding domain selected from SEQ ID NOS: 710-721, 734-745, 771, 774, 775, 777, or 780. In one embodiment, the CD19 binding domain comprises a light chain variable region described herein (e.g., in Table 13A or 14A) and/or a heavy chain variable region described herein (e.g., in Table 13A or 14A). In one embodiment, the CD19 binding domain is a scFv comprising a light chain variable region and a heavy chain variable region of an amino acid sequence of Table 13A or 14A. In an embodiment, the CD19 binding domain (e.g., an scFV) comprises: a light chain variable region comprising an amino acid sequence having at least one, two or three modifications (e.g., substitutions) but not more than 30, 20 or 10 modifications (e.g., substitutions) of an amino acid sequence of a light chain variable region provided in Table 13A or 14A, or a sequence with at least 95% (e.g., 95-99%) identity to an amino acid sequence of Table 13A or 14A; and/or a heavy chain variable region comprising an amino acid sequence having at least one, two or three modifications (e.g., substitutions) but not more than 30, 20 or 10 modifications (e.g., substitutions) of an amino acid sequence of a heavy chain variable region provided in Table 13A or 14A, or a sequence with 95% (e.g., 95-99%) identity to an amino acid sequence of Table 13A or 14A.

[0426] In one embodiment, the CD19 binding domain comprises a light chain variable region comprising an amino acid sequence described herein, e.g., in Table 13A or 14A, is attached to a heavy chain variable region comprising an amino acid sequence described herein, e.g., in Table 13A or 14A, via a linker, e.g., a linker described herein. In one embodiment, the humanized anti-CD19 binding domain includes a (Gly4-Ser)n linker (SEQ ID NO: 26), wherein n is 1, 2, 3, 4, 5, or 6, preferably 3 or 4. The light chain variable region and heavy chain variable region of a scFv can be, e.g., in any of the following orientations: light chain variable region-linker-heavy chain variable region or heavy chain variable region-linker-light chain variable region.

[0427] In another embodiment, the CD19 binding domain comprises any antibody or antibody fragment thereof known in the art that binds to CD19.

[0428] In one embodiment, the framework region can comprise, one, two, three, four or five modifications, e.g., substitutions, e.g., from the amino acid at the corresponding murine sequence (e.g., of SEQ ID NO: 774). In one embodiment, the framework region, e.g., all four framework regions of the light chain variable region are derived from a VK3 1.25 germline sequence. In one embodiment, the framework region can comprise, one, two, three, four or five modifications, e.g., substitutions, e.g., from the amino acid at the corresponding murine sequence (e.g., of SEQ ID NO: 774).

### Exemplary CD19 Antigen Binding Domains and CAR Constructs

[0429] Exemplary CD19 CAR constructs disclosed herein comprise a scFv (e.g., a human scFv) as disclosed in Table 13A or 14A herein, optionally preceded with an optional leader sequence (e.g., SEQ ID NO:1 and SEQ ID NO:12 for exemplary leader amino acid and nucleotide sequences, respectively). The sequences of the scFv fragments (amino acid sequences of SEQ ID NOs: 710-721, 734-745, 771, 774, 775, 777, or 780) are provided herein in Table 13A or 14A. The CD19 CAR construct can further include an optional hinge domain, e.g., a CD8 hinge domain (e.g., including the amino acid sequence of SEQ ID NO: 2 or encoded by a nucleic acid sequence of SEQ ID NO:13); a transmembrane domain, e.g., a CD8 transmembrane domain (e.g., including the amino acid sequence of SEQ ID NO: 6 or encoded by the nucleotide sequence of SEQ ID NO: 17); an intracellular domain, e.g., a 4-1BB intracellular domain (e.g., including the amino acid sequence of SEQ ID NO: 7 or encoded by the nucleotide sequence of SEQ ID NO: 18; and a functional signaling domain, e.g., a CD3 zeta domain (e.g., including amino acid sequence of SEQ ID NO: 9 or 10, or encoded by the nucleotide sequence of SEQ ID NO: 20 or 21). In certain embodiments, the domains are contiguous with and in the same reading frame to form a single fusion protein. In other embodiments, the domain are in separate polypeptides, e.g., as in an RCAR molecule as described herein.

[0430] In certain embodiments, the full length CD19 CAR molecule includes the amino acid sequence of, or is encoded by the nucleotide sequence of, CAR1-CAR12, CTL019, mCAR1-mCAR3, or SSJ25-C1, provided in Table 13A or 14A, or a sequence substantially identical (e.g., at least 95%, e.g., 95-99% identical thereto, or up to 20, 15, 10, 8, 6, 5, 4, 3, 2, or 1 amino acid changes) to any of the aforesaid sequences.

[0431] In certain embodiments, the CD19 CAR molecule, or the CD19 antigen binding domain, includes the scFv amino acid sequence of, or is encoded by the nucleotide sequence of, CAR1-CAR12, CTL019, mCAR1-mCAR3, or SSJ25-C1, provided in Table 13A or 14A, or a sequence substantially identical (e.g., at least 95%, e.g., 95-99% identical thereto, or up to 20, 15, 10, 8, 6, 5, 4, 3, 2, or 1 amino acid changes) to any of the aforesaid sequences.

[0432] In certain embodiments, the CD19 CAR molecule, or the CD19 antigen binding domain, includes the heavy chain variable region and/or the light chain variable region of CAR1-CAR12, CTL019, mCAR1-mCAR3, or SSJ25-C1, provided in Table 13A or 14A, or a sequence substantially identical (e.g., at least 95%, e.g., 95-99% identical, or up to 20, 15, 10, 8, 6, 5, 4, 3, 2, or 1 amino acid changes) to any of the aforesaid sequences.

[0433] In certain embodiments, the CD19 CAR molecule, or the CD19 antigen binding domain, includes one, two or three CDRs from the heavy chain variable region (e.g., HCDR1, HCDR2 and/or HCDR3) of CAR1-CAR12, CTL019, mCAR1-mCAR3, or SSJ25-C1, provided in Table 13A or 14A; and/or one, two or three CDRs from the light chain variable region (e.g., LCDR1, LCDR2 and/or LCDR3) of CAR1-CAR12, CTL019, mCAR1-mCAR3, or SSJ25-C1, provided in Table 13A or 14A; or a sequence substantially identical (e.g., at least 95%, e.g., 95-99% identical, or up to 5, 4, 3, 2, or 1 amino acid changes) to any of the aforesaid sequences.

[0434] The sequences of CDR sequences of the scFv domains are shown in Table 15A for the heavy chain variable domains and in Table 16A for the light chain variable domains.

[0435] The amino acid and nucleic acid sequences of the CD19 scFv domains and CD19 CAR molecules are provided in Tables 13A and 14A. In one embodiment, the CD19 CAR molecule includes a leader sequence described herein, e.g., as underlined in the sequences provided in Tables 13A and 14A. In one embodiment, the CD19 CAR molecule does not include a leader sequence.

[0436] In embodiments, the CAR molecule comprises an antigen binding domain that binds specifically to CD19 (CD19 CAR). In one embodiment, the antigen binding domain targets human CD19. In one embodiment, the antigen binding domain of the CAR has the same or a similar binding specificity as the FMC63 scFv fragment described in Nicholson et al. Mol. Immun. 34 (16-17): 1157-1165 (1997). In one embodiment, the antigen binding domain of the CAR includes the scFv fragment described in Nicholson et al. Mol. Immun. 34 (16-17): 1157-1165 (1997). A CD19 antibody molecule can be, e.g., an antibody molecule (e.g., a humanized anti-CD19 antibody molecule) described in WO2014/153270, which is incorporated herein by reference in its entirety. WO2014/153270 also describes methods of assaying the binding and efficacy of various CAR constructs.

[0437] In one aspect, the parental murine scFv sequence is the CAR19 construct provided in PCT publication WO2012/079000 (incorporated herein by reference) and provided herein as SEQ ID NO: 773. In one embodiment, the anti-CD19 binding domain is a scFv described in WO2012/079000 and provided herein in SEQ ID NO: 774.

[0438] In one embodiment, the CAR molecule comprises the polypeptide sequence provided as SEQ ID NO: 12 in PCT publication WO2012/079000, and provided herein as SEQ ID NO: 773, wherein the scFv domain is substituted by one or more sequences selected from SEQ ID NOS: 758-769. In one embodiment, the scFv domains of SEQ ID NOS: 758-769 are humanized variants of the scFv domain of SEQ ID NO: 774 which is an scFv fragment of murine origin that specifically binds to human CD19. Humanization of this mouse scFv may be desired for the clinical setting, where the mouse-specific residues may induce a human-anti-mouse antigen (HAMA) response in patients who receive CART19 treatment, e.g., treatment with T cells transduced with the CAR19 construct.

[0439] In one embodiment, the CD19 CAR comprises an amino acid sequence provided as SEQ ID NO: 12 in PCT publication WO2012/079000. In embodiment, the amino acid sequence is

(SEQ ID NO: 773)

MALPVTALLLPLALLLHAARPdiqmtqttsslsaslgdrvtiscrasqdi
skylnwyqqkpdgtvklliyhtsrlhsgvpsrfsgsgsgtdysltisnle
qediatyfcqqgntlpytfgggtkleitggggsggggsggggsevklqes
gpglvapsqslsvtctvsgvslpdygvswirqpprkglewlgviwgsett
yynsalksrltiikdnsksqvflkmnslqtddtaiyycakhyyyggsyam
dywgqgtsvtvsstttpaprpptpaptiasqplslrpeacrpaaggavht
rgldfacdiyiwaplagtcgvlllslvitlyckrgrkkllyifkqpfmrp
vqttqeedgcscrfpeeeeggcelrvkfsrsadapaykqgqnqlynelnl
grreeydvldkrrgrdpemggkprrknpqeglynelqkdkmaeayseigm
kgerrrgkghdglyqglstatkdtydalhmqalppr, or asequence
substantially homologous thereto.

[0440] In embodiment, the amino acid sequence is:

(SEQ ID NO: 793)

diqmtqttsslsaslgdrvtiscrasqdiskylnwyqqkpdgtvklli
yhtsrlhsgvpsrfsgsgsgtdysltisnleqediat
yfcqqgntlpytfgggtkleitggggsggggsggggsevklqesg
pglvapsqslsvtctvsgvslpdygvswirqpprkglewlgv
iwgsettyynsalksrltiikdnsksqvflkmnslqtddtaiyycakh
yyyggsyamdywgqgtsvtvsstttpaprpptpaptiasq
plslrpeacrpaaggavhtrgldfacdiyiwaplagtcgvlllslvit
lyckrgrkkllyifkqpfmrpvqttqeedgcscrfpeeeeggc
elrvkfsrsadapaykqgqnqlynelnlgrreeydvldkrrgrdpe
mggkprrknpqeglynelqkdkmaeayseigmkgerrrg
kghdglyqglstatkdtydalhmqalppr, or a sequence
substantially homologous thereto.

[0441] In one embodiment, the CD19 CAR has the USAN designation TISAGENLECLEUCEL-T. In embodiments, CTL019 is made by a gene modification of T cells is mediated by stable insertion via transduction with a self-inactivating, replication deficient Lentiviral (LV) vector containing the CTL019 transgene under the control of the EF-1 alpha promoter. CTL019 can be a mixture of transgene positive and negative T cells that are delivered to the subject on the basis of percent transgene positive T cells.

[0442] In other embodiments, the CD19 CAR comprises an antigen binding domain (e.g., a humanized antigen binding domain) according to Table 3 of WO2014/153270, incorporated herein by reference.

[0443] In embodiments, the CAR molecule is a CD19 CAR molecule described herein, e.g., a humanized CAR molecule described herein, e.g., a humanized CD19 CAR molecule of Table 13A or having CDRs as set out in Tables 15A and 16A.

[0444] In embodiments, the CAR molecule is a CD19 CAR molecule described herein, e.g., a murine CAR molecule described herein, e.g., a murine CD19 CAR molecule of Table 14A or having CDRs as set out in Tables 15A and 16A.

[0445] In some embodiments, the CAR molecule comprises one, two, and/or three CDRs from the heavy chain variable region and/or one, two, and/or three CDRs from the light chain variable region of the murine or humanized CD19 CAR of Table 15A and 16A.

[0446] In one embodiment, the antigen binding domain comprises one, two three (e.g., all three) heavy chain CDRs, HC CDR1, HC CDR2 and HC CDR3, from an antibody listed herein, and/or one, two, three (e.g., all three) light chain CDRs, LC CDR1, LC CDR2 and LC CDR3, from an antibody listed herein. In one embodiment, the antigen binding domain comprises a heavy chain variable region and/or a variable light chain region of an antibody listed herein.

### Humanization of Murine Anti-CD19 Antibody

[0447] Humanization of murine CD19 antibody is desired for the clinical setting, where the mouse-specific residues may induce a human-anti-mouse antigen (HAMA) response in patients who receive CART19 treatment, i.e., treatment with T cells transduced with the CAR19 construct. The production, characterization, and efficacy of humanized CD19 CAR sequences is described in International Application WO2014/153270 which is herein incorporated by reference in its entirety, including Examples 1-5 (p. 115-159), for instance Tables 3, 4, and 5 (p. 125-147).

### CAR Constructs, e.g., CD19 CAR Constructs

[0448] Of the CD19 CAR constructs described in International Application WO2014/153270, certain sequences are reproduced herein.

[0449] The sequences of the humanized scFv fragments (SEQ ID NOS: 710-721) are provided below in Table 13A. Full CAR constructs were generated using SEQ ID NOs: 710-721with additional sequences, e.g., from the “CAR constructs components” section herein, to generate full CAR constructs with SEQ ID NOs: 758-769.

[0450] These clones all contained a Q/K residue change in the signal domain of the co-stimulatory domain derived from 4-1BB.

TABLE 13A
Humanized CD19 CAR Constructs

| | | |
|---|---|---|
| | SEQ | |
| Name | ID | Sequence |

CAR 1

| | | |
|---|---|---|
| CAR1 | 710 | EIVMTQSPATLSLSPGERATLSCRASQDISKYLNWYQQKPGQA |
| scFv | | PRLLIYHTSRLHSGIPARFSGSGSGTDYTLTISSLQPEDFAVYFC |
| domain | | QQGNTLPYTFGQGTKLEIKGGGGSGGGGSGGGGSQVQLQESG |
| | | PGLVKPSETLSLTCTVSGVSLPDYGVSWIRQPPGKGLEWIGVI |
| | | WGSETTYYSSSLKSRVTISKDNSKNQVSLKLSSVTAADTAVYY |
| | | CAKHYYYGGSYAMDYWGQGTLVTVSS |
| 103101 | 722 | atggccctccctgtcaccgccctgctgcttccgctggctcttctgctccacgccgctcggcccgaaa |
| CAR1 | | ttgtgatgacccagtcacccgccactcttagcctttcacccggtgagcgcgcaaccctgtcttgcag |
| Soluble | | agcctcccaagacatctcaaaataccttaattggtatcaacagaagcccggacaggctcctcgcctt |
| scFv-nt | | ctgatctaccacaccagccggctccattctggaatccctgccaggttcagcggtagcggatctggg |
| | | accgactacaccctcactatcagctcactgcagccagaggacttcgctgtctatttctgtcagcaagg |
| | | gaacaccctgccctacacctttggacagggcaccaagctcgagattaaaggtggaggtggcagcg |
| | | gaggaggtgggtccggcggtggaggaagccaggtccaactccaagaaagcggaccgggtcttg |
| | | tgaagccatcagaaactctttcactgacttgtactgtgagcggagtgtctctccccgattacggggtgt |
| | | cttggatcagacagccaccggggaagggtctggaatggattggagtgatttggggctctgagacta |
| | | cttactactcttcatccctcaagtcacgcgtcaccatctcaaaggacaactctaagaatcaggtgtcac |
| | | tgaaactgtcatctgtgaccgcagccgacaccgccgtgtactattgcgctaagcattactattatggc |
| | | gggagctacgcaatggattactggggacagggtactctggtcaccgtgtccagccaccaccatcat |
| | | caccatcaccat |
| 103101 | 734 | MALPVTALLLPLALLLHAARPeivmtqspatlslspgeratlscrasqdiskyl |
| CAR1 | | nwyqqkpgqaprlliyhtsrlhsgiparfsgsgsgtdytltisslqpedfavyfcqqgntlpytfgq |
| Soluble | | gtkleikggggsggggsggggsqvqlqesgpglvkpsetlsltctvsgvslpdygvswirqppg |
| scFv-aa | | kglewigviwgsettyyssslksrvtiskdnsknqvslklssvtaadtavyycakhyyyggsya |
| | | mdywgqgtlvtvsshhhhhhhh |
| 104875 | 746 | atggccctccctgtcaccgccctgctgcttccgctggctcttctgctccacgccgctcggcccgaaa |
| CAR1- | | ttgtgatgacccagtcacccgccactcttagcctttcacccggtgagcgcgcaaccctgtcttgcag |
| Full-nt | | agcctcccaagacatctcaaaataccttaattggtatcaacagaagcccggacaggctcctcgcctt |
| | | ctgatctaccacaccagccggctccattctggaatccctgccaggttcagcggtagcggatctggg |
| | | accgactacaccctcactatcagctcactgcagccagaggacttcgctgtctatttctgtcagcaagg |
| | | gaacaccctgccctacacctttggacagggcaccaagctcgagattaaaggtggaggtggcagcg |
| | | gaggaggtgggtccggcggtggaggaagccaggtccaactccaagaaagcggaccgggtcttg |
| | | tgaagccatcagaaactctttcactgacttgtactgtgagcggagtgtctctccccgattacggggtgt |
| | | cttggatcagacagccaccggggaagggtctggaatggattggagtgatttggggctctgagacta |
| | | cttactactcttcatccctcaagtcacgcgtcaccatctcaaaggacaactctaagaatcaggtgtcac |
| | | tgaaactgtcatctgtgaccgcagccgacaccgccgtgtactattgcgctaagcattactattatggc |
| | | gggagctacgcaatggattactggggacagggtactctggtcaccgtgtccagcaccactacccc |
| | | agcaccgaggccacccaccccggctcctaccatcgcctcccagcctctgtccctgcgtccggagg |
| | | catgtagacccgcagctggtggggccgtgcatacccggggtcttgacttcgcctgcgatatctacat |
| | | ttgggcccctctggctggtacttgcggggtcctgctgctttcactcgtgatcactctttactgtaagcgc |
| | | ggtcggaagaagctgctgtacatctttaagcaacccttcatgaggcctgtgcagactactcaagagg |
| | | aggacggctgttcatgccggttcccagaggaggaggaaggcggctgcgaactgcgcgtgaaatt |
| | | cagccgcagcgcagatgctccagcctacaagcaggggcagaaccagctctacaacgaactcaat |
| | | cttggtcggagagaggagtacgacgtgctggacaagcggagaggacgggacccagaaatgggc |
| | | gggaagccgcgcagaaagaatccccaagagggcctgtacaacgagctccaaaaggataagatg |
| | | gcagaagcctatagcgagattggtatgaaaggggaacgcagaagaggcaaaggccacgacgga |
| | | ctgtaccagggactcagcaccgccaccaaggacacctatgacgctcttcacatgcaggccctgcc |
| | | gcctcgg |
| 104875 | 758 | MALPVTALLLPLALLLHAARPeivmtqspatlslspgeratlscrasadiskyln |
| CAR 1- | | wyqqkpgqaprlliyhtsrlhsgiparfsgsgsgtdytltisslqpedfavyfcqqgntlpytfgq |
| Full-aa | | gtkleikggggsggggsggggsqvqlqesgpglvkpsetlsltctvsgvslpdygvswirqppg |
| | | kglewigviwgsettyyssslksrvtiskdnsknqvslklssvtaadtavyycakhyyyggsya |
| | | mdywgqgtlvtvsstttpaprpptpaptiasqplslrpeacrpaaggavhtrgldfacdiyiwapl |
| | | agtcgvlllslvitlyckrgrkkllyifkqpfmrpvqttqeedgcscrfpeeeeggcelrvkfsrsad |
| | | apaykqgqnqlynelnlgrreeydvldkrrgrdpemggkprrknpqeglynelqkdkmaea |
| | | yseigmkgerrrgkghdglyqglstatkdtydalhmqalppr |

CAR 2

| | | |
|---|---|---|
| CAR2 | 711 | eivmtqspatlslspgeratlscrasqdiskylnwyqqkpgqaprlliyhtsrlhsgiparfsgsgs |
| scFv | | gtdytltisslqpedfavyfcqqgntlpytfgqgtkleikggggsggggsggggsqvqlqesgpg |
| domain | | lvkpsetlsltctvsgvslpdygvswirqppgkglewigviwgsettyyqsslksrvtiskdnskn |
| | | qvslklssvtaadtavyycakhyyyggsyamdywgqgtlvtvss |
| 103102 | 723 | atggccctccctgtcaccgccctgctgcttccgctggctcttctgctccacgccgctcggcccgaaa |
| CAR2- | | ttgtgatgacccagtcacccgccactcttagcctttcacccggtgagcgcgcaaccctgtcttgcag |
| Soluble | | agcctcccaagacatctcaaaataccttaattggtatcaacagaagcccggacaggctcctcgcctt |
| scFv-nt | | ctgatctaccacaccagccggctccattctggaatccctgccaggttcagcggtagcggatctggg |
| | | accgactacaccctcactatcagctcactgcagccagaggacttcgctgtctatttctgtcagcaagg |
| | | gaacaccctgccctacacctttggacagggcaccaagctcgagattaaaggtggaggtggcagcg |
| | | gaggaggtgggtccggcggtggaggaagccaggtccaactccaagaaagcggaccgggtcttg |
| | | tgaagccatcagaaactctttcactgacttgtactgtgagcggagtgtctctccccgattacggggtgt |
| | | cttggatcagacagccaccggggaagggtctggaatggattggagtgatttggggctctgagacta |
| | | cttactaccaatcatccctcaagtcacgcgtcaccatctcaaaggacaactctaagaatcaggtgtca |
| | | ctgaaactgtcatctgtgaccgcagccgacaccgccgtgtactattgcgctaagcattactattatgg |
| | | cgggagctacgcaatggattactggggacagggtactctggtcaccgtgtccagccaccaccatc |
| | | atcaccatcaccat |
| 103102 | 735 | MALPVTALLLPLALLLHAARPeivmtqspatlslspgeratlscrasqdiskyl |
| CAR2- | | nwyqqkpgqaprlliyhtsrlhsgiparfsgsgsgtdytltisslqpedfavyfcqqgntlpytfgq |
| Soluble | | gtkleikggggsggggsggggsqvqlqesgpglvkpsetlsltctvsgvslpdygvswirqppg |
| scFv-aa | | kglewigviwgsettyyqsslksrvtiskdnsknqvslklssvtaadtavyycakhyyyggsya |
| | | mdywgqgtlvtvsshhhhhhhh |
| 104876 | 747 | atggccctccctgtcaccgccctgctgcttccgctggctcttctgctccacgccgctcggcccgaaa |
| CAR 2- | | ttgtgatgacccagtcacccgccactcttagcctttcacccggtgagcgcgcaaccctgtcttgcag |
| Full-nt | | agcctcccaagacatctcaaaataccttaattggtatcaacagaagcccggacaggctcctcgcctt |
| | | ctgatctaccacaccagccggctccattctggaatccctgccaggttcagcggtagcggatctggg |
| | | accgactacaccctcactatcagctcactgcagccagaggacttcgctgtctatttctgtcagcaagg |
| | | gaacaccctgccctacacctttggacagggcaccaagctcgagattaaaggtggaggtggcagcg |
| | | gaggaggtgggtccggcggtggaggaagccaggtccaactccaagaaagcggaccgggtcttg |
| | | tgaagccatcagaaactctttcactgacttgtactgtgagcggagtgtctctccccgattacggggtgt |
| | | cttggatcagacagccaccggggaagggtctggaatggattggagtgatttggggctctgagacta |
| | | cttactaccaatcatccctcaagtcacgcgtcaccatctcaaaggacaactctaagaatcaggtgtca |
| | | ctgaaactgtcatctgtgaccgcagccgacaccgccgtgtactattgcgctaagcattactattatgg |
| | | cgggagctacgcaatggattactggggacagggtactctggtcaccgtgtccagcaccactaccc |
| | | cagcaccgaggccacccaccccggctcctaccatcgcctcccagcctctgtccctgcgtccggag |
| | | gcatgtagacccgcagctggtggggccgtgcatacccggggtcttgacttcgcctgcgatatctac |
| | | atttgggcccctctggctggtacttgcggggtcctgctgctttcactcgtgatcactctttactgtaagc |
| | | gcggtcggaagaagctgctgtacatctttaagcaacccttcatgaggcctgtgcagactactcaaga |
| | | ggaggacggctgttcatgccggttcccagaggaggaggaaggcggctgcgaactgcgcgtgaa |
| | | attcagccgcagcgcagatgctccagcctacaagcaggggcagaaccagctctacaacgaactc |
| | | aatcttggtcggagagaggagtacgacgtgctggacaagcggagaggacgggacccagaaatg |
| | | ggcgggaagccgcgcagaaagaatccccaagagggcctgtacaacgagctccaaaaggataag |
| | | atggcagaagcctatagcgagattggtatgaaaggggaacgcagaagaggcaaaggccacgac |
| | | ggactgtaccagggactcagcaccgccaccaaggacacctatgacgctcttcacatgcaggccct |
| | | gccgcctcgg |
| 104876 | 759 | MALPVTALLLPLALLLHAARPeivmtqspatlslspgeratlscrasadiskyln |
| CAR 2- | | wyqqkpgqaprlliyhtsrlhsgiparfsgsgsgtdytltisslqpedfavyfcqqgntlpytfgq |
| Full-aa | | gtkleikggggsggggsggggsqvqlqesgpglvkpsetlsltctvsgvslpdygvswirqppg |
| | | kglewigviwgsettyyqsslksrvtiskdnsknqvslklssvtaadtavyycakhyyyggsy |
| | | amdywgqgtlvtvsstttpaprpptpaptiasqplslrpeacrpaaggavhtrgldfacdiyiwa |
| | | plagtcgvlllslvitlyckrgrkkllyifkqpfmrpvqttqeedgcscrfpeeeeggcelrvkfsrs |
| | | adapaykqgqnqlynelnlgrreeydvldkrrgrdpemggkprrknpqeglynelqkdkma |
| | | eayseigmkgerrrgkghdglyqglstatkdtydalhmqalppr |

CAR 3

| | | |
|---|---|---|
| CAR3 | 712 | qvqlqesgpglvkpsetlsltctvsgvslpdygvswirqppgkglewigviwgsettyyssslks |
| scFv | | rvtiskdnsknqvslklssvtaadtavyycakhyyyggsyamdywgqgtlvtvssggggsgg |
| domain | | ggsggggseivmtqspatlslspgeratlscrasqdiskylnwyqqkpgqaprlliyhtsrlhsgi |
| | | parfsgsgsgtdytltisslqpedfavyfcqqgntlpytfgqgtkleik |
| 103104 | 724 | atggctctgcccgtgaccgcactcctcctgccactggctctgctgcttcacgccgctcgcccacaag |
| CAR 3- | | tccagcttcaagaatcagggcctggtctggtgaagccatctgagactctgtccctcacttgcaccgtg |
| Soluble | | agcggagtgtccctcccagactacggagtgagctggattagacagcctcccggaaagggactgg |
| scFv-nt | | agtggatcggagtgatttggggtagcgaaaccacttactattcatcttccctgaagtcacgggtcacc |
| | | atttcaaaggataactcaaagaatcaagtgagcctcaagctctcatcagtcaccgccgctgacaccg |
| | | ccgtgtattactgtgccaagcattactactatggagggtcctacgccatggactactggggccaggg |
| | | aactctggtcactgtgtcatctggtggaggaggtagcggaggaggcgggagcggtggaggtggc |
| | | tccgaaatcgtgatgacccagagccctgcaaccctgtccctttctcccggggaacgggctacccttt |
| | | cttgtcgggcatcacaagatatctcaaaatacctcaattggtatcaacagaagccgggacaggccc |
| | | ctaggcttcttatctaccacacctctcgcctgcatagcgggattcccgcacgctttagcgggtctgga |
| | | agcgggaccgactacactctgaccatctcatctctccagcccgaggacttcgccgtctacttctgcc |
| | | agcagggtaacaccctgccgtacaccttcggccagggcaccaagcttgagatcaaacatcaccac |
| | | catcatcaccatcac |
| 103104 | 736 | MALPVTALLLPLALLLHAARPqvqlqesgpglvkpsetlsltctvsgvslpdy |
| CAR 3- | | gvswirqppgkglewigviwgsettyyssslksrvtiskdnsknqvslklssvtaadtavyycak |
| Soluble | | hyyyggsyamdywgqgtlvtvssggggsggggsggggseivmtqspatlslspgeratlscra |
| scFv-aa | | sqdiskylnwyqqkpgqaprlliyhtsrlhsgiparfsgsgsgtdytltisslqpedfavyfcqqgn |
| | | tlpytfgqgtkleikhhhhhhhh |
| 104877 | 748 | atggctctgcccgtgaccgcactcctcctgccactggctctgctgcttcacgccgctcgcccacaag |
| CAR 3- | | tccagcttcaagaatcagggcctggtctggtgaagccatctgagactctgtccctcacttgcaccgtg |
| Full-nt | | agcggagtgtccctcccagactacggagtgagctggattagacagcctcccggaaagggactgg |
| | | agtggatcggagtgatttggggtagcgaaaccacttactattcatcttccctgaagtcacgggtcacc |
| | | atttcaaaggataactcaaagaatcaagtgagcctcaagctctcatcagtcaccgccgctgacaccg |
| | | ccgtgtattactgtgccaagcattactactatggagggtcctacgccatggactactggggccaggg |
| | | aactctggtcactgtgtcatctggtggaggaggtagcggaggaggcgggagcggtggaggtggc |
| | | tccgaaatcgtgatgacccagagccctgcaaccctgtccctttctcccggggaacgggctacccttt |
| | | cttgtcgggcatcacaagatatctcaaaatacctcaattggtatcaacagaagccgggacaggccc |
| | | ctaggcttcttatctaccacacctctcgcctgcatagcgggattcccgcacgctttagcgggtctgga |
| | | agcgggaccgactacactctgaccatctcatctctccagcccgaggacttcgccgtctacttctgcc |
| | | agcagggtaacaccctgccgtacaccttcggccagggcaccaagcttgagatcaaaaccactact |
| | | cccgctccaaggccacccacccctgccccgaccatcgcctctcagccgctttccctgcgtccgga |
| | | ggcatgtagacccgcagctggtggggccgtgcatacccggggtcttgacttcgcctgcgatatcta |
| | | catttgggcccctctggctggtacttgcggggtcctgctgctttcactcgtgatcactctttactgtaag |
| | | cgcggtcggaagaagctgctgtacatctttaagcaacccttcatgaggcctgtgcagactactcaag |
| | | aggaggacggctgttcatgccggttcccagaggaggaggaaggcggctgcgaactgcgcgtga |
| | | aattcagccgcagcgcagatgctccagcctacaagcaggggcagaaccagctctacaacgaact |
| | | caatcttggtcggagagaggagtacgacgtgctggacaagcggagaggacgggacccagaaat |
| | | gggcgggaagccgcgcagaaagaatccccaagagggcctgtacaacgagctccaaaaggataa |
| | | gatggcagaagcctatagcgagattggtatgaaaggggaacgcagaagaggcaaaggccacga |
| | | cggactgtaccagggactcagcaccgccaccaaggacacctatgacgctcttcacatgcaggccc |
| | | tgccgcctcgg |
| 104877 | 760 | MALPVTALLLPLALLLHAARPqvqlqesgpglvkpsetlsltctvsgvslpdygv |
| CAR 3- | | swirqppgkglewigviwgsettyyssslksrvtiskdnsknqvslklssvtaadtavyycakh |
| Full-aa | | yyyggsyamdywgqgtlvtvssggggsggggsggggseivmtqspatlslspgeratlscra |
| | | sqdiskylnwyqqkpgqaprlliyhtsrlhsgiparfsgsgsgtdytitisslqpedfavyfcqq |
| | | gntlpytfgqgtkleiktttpaprpptpaptiasqplslrpeacrpaaggavhtrgldfacdiyiwa |
| | | plagtcgvlllslvitlyckrgrkkllyifkqpfmrpvqttqeedgcscrfpeeeeggcelrvkfsrs |
| | | adapaykqgqnqlynelnlgrreeydvldkrrgrdpemggkprrknpqeglynelqkdkma |
| | | eayseigmkgerrrgkghdglyqglstatkdtydalhmqalppr |

CAR 4

| | | |
|---|---|---|
| CAR4 | 713 | qvqlqesgpglvkpsetlsltctvsgvslpdygvswirqppgkglewigviwgsettyyqsslks |
| scFv | | rvtiskdnsknqvslklssvtaadtavyycakhyyyggsyamdywgqgtlvtvssggggsgg |
| domain | | ggsggggseivmtqspatlslspgeratlscrasqdiskylnwyqqkpgqaprlliyhtsrlhsgi |
| | | parfsgsgsgtdytltisslqpedfavyfcqqgntlpytfgqgtkleik |
| 103106 | 725 | atggctctgcccgtgaccgcactcctcctgccactggctctgctgcttcacgccgctcgcccacaag |
| CAR4- | | tccagcttcaagaatcagggcctggtctggtgaagccatctgagactctgtccctcacttgcaccgtg |
| Soluble | | agcggagtgtccctcccagactacggagtgagctggattagacagcctcccggaaagggactgg |
| scFv-nt | | agtggatcggagtgatttggggtagcgaaaccacttactatcaatcttccctgaagtcacgggtcac |
| | | catttcaaaggataactcaaagaatcaagtgagcctcaagctctcatcagtcaccgccgctgacacc |
| | | gccgtgtattactgtgccaagcattactactatggagggtcctacgccatggactactggggccagg |
| | | gaactctggtcactgtgtcatctggtggaggaggtagcggaggaggcgggagcggtggaggtgg |
| | | ctccgaaatcgtgatgacccagagccctgcaaccctgtccctttctcccggggaacgggctaccctt |
| | | tcttgtcgggcatcacaagatatctcaaaatacctcaattggtatcaacagaagccgggacaggccc |
| | | ctaggcttcttatctaccacacctctcgcctgcatagcgggattcccgcacgctttagcgggtctgga |
| | | agcgggaccgactacactctgaccatctcatctctccagcccgaggacttcgccgtctacttctgcc |
| | | agcagggtaacaccctgccgtacaccttcggccagggcaccaagcttgagatcaaacatcaccac |
| | | catcatcaccatcac |
| 103106 | 737 | MALPVTALLLPLALLLHAARPqvqlqesgpglvkpsetlsltctvsgvslpdy |
| CAR4- | | gvswirqppgkglewigviwgsettyyqsslksrvtiskdnsknqvslklssvtaadtavyyca |
| Soluble | | khyyyggsyamdywgqgtlvtvssggggsggggsggggseivmtqspatlslspgeratlscr |
| scFv-aa | | asqdiskylnwyqqkpgqaprlliyhtsrlhsgiparfsgsgsgtdytltisslqpedfavyfcqqg |
| | | ntlpytfgqgtkleikhhhhhhhh |
| 104878 | 749 | atggctctgcccgtgaccgcactcctcctgccactggctctgctgcttcacgccgctcgcccacaag |
| CAR 4- | | tccagcttcaagaatcagggcctggtctggtgaagccatctgagactctgtccctcacttgcaccgtg |
| Full-nt | | agcggagtgtccctcccagactacggagtgagctggattagacagcctcccggaaagggactgg |
| | | agtggatcggagtgatttggggtagcgaaaccacttactatcaatcttccctgaagtcacgggtcac |
| | | catttcaaaggataactcaaagaatcaagtgagcctcaagctctcatcagtcaccgccgctgacacc |
| | | gccgtgtattactgtgccaagcattactactatggagggtcctacgccatggactactggggccagg |
| | | gaactctggtcactgtgtcatctggtggaggaggtagcggaggaggcgggagcggtggaggtgg |
| | | ctccgaaatcgtgatgacccagagccctgcaaccctgtccctttctcccggggaacgggctaccctt |
| | | tcttgtcgggcatcacaagatatctcaaaatacctcaattggtatcaacagaagccgggacaggccc |
| | | ctaggcttcttatctaccacacctctcgcctgcatagcgggattcccgcacgctttagcgggtctgga |
| | | agcgggaccgactacactctgaccatctcatctctccagcccgaggacttcgccgtctacttctgcc |
| | | agcagggtaacaccctgccgtacaccttcggccagggcaccaagcttgagatcaaaaccactact |
| | | cccgctccaaggccacccacccctgccccgaccatcgcctctcagccgctttccctgcgtccgga |
| | | ggcatgtagacccgcagctggtggggccgtgcatacccggggtcttgacttcgcctgcgatatcta |
| | | catttgggcccctctggctggtacttgcggggtcctgctgctttcactcgtgatcactctttactgtaag |
| | | cgcggtcggaagaagctgctgtacatctttaagcaacccttcatgaggcctgtgcagactactcaag |
| | | aggaggacggctgttcatgccggttcccagaggaggaggaaggcggctgcgaactgcgcgtga |
| | | aattcagccgcagcgcagatgctccagcctacaagcaggggcagaaccagctctacaacgaact |
| | | caatcttggtcggagagaggagtacgacgtgctggacaagcggagaggacgggacccagaaat |
| | | gggcgggaagccgcgcagaaagaatccccaagagggcctgtacaacgagctccaaaaggataa |
| | | gatggcagaagcctatagcgagattggtatgaaaggggaacgcagaagaggcaaaggccacga |
| | | cggactgtaccagggactcagcaccgccaccaaggacacctatgacgctcttcacatgcaggccc |
| | | tgccgcctcgg |
| 104878 | 761 | MALPVTALLLPLALLLHAARPqvqlqesgpglvkpsetlsltctvsgvslpdygv |
| CAR 4- | | swirqppgkglewigviwgsettyyqsslksrvtiskdnsknqvslklssvtaadtavyycakh |
| Full-aa | | yyyggsyamdywgqgtlvtvssggggsggggsggggseivmtqspatlslspgeratlscra |
| | | sqdiskylnwyqqkpgqaprlliyhtsrlhsgiparfsgsgsgtdytltisslqpedfavyfcqq |
| | | gntlpytfgqgtkleiktttpaprpptpaptiasqplslrpeacrpaaggavhtrgldfacdiyiwa |
| | | plagtcgvlllslvitlyckrgrkkllyifkqpfmrpvqttqeedgcscrfpeeeeggcelrvkfsrs |
| | | adapaykqgqnqlynelnlgrreeydvldkrrgrdpemggkprrknpqeglynelqkdkma |
| | | eayseigmkgerrrgkghdglyqglstatkdtydalhmqalppr |

CAR 5

| | | |
|---|---|---|
| CAR 5 | 714 | eivmtqspatlslspgeratlscrasqdiskylnwyqqkpgqaprlliyhtsrlhsgiparfsgsgs |
| scFv | | gtdytltisslqpedfavyfcqqgntlpytfgqgtkleikggggsggggsggggsggggsqvqlq |
| domain | | esgpglvkpsetlsltctvsgvslpdygvswirqppgkglewigviwgsettyyssslksrvtisk |
| | | dnsknqvslklssvtaadtavyycakhyyyggsyamdywgqgtlvtvss |
| 99789 | 726 | atggccctcccagtgaccgctctgctgctgcctctcgcacttcttctccatgccgctcggcctgagat |
| CAR5- | | cgtcatgacccaaagccccgctaccctgtccctgtcacccggcgagagggcaaccctttcatgcag |
| Soluble | | ggccagccaggacatttctaagtacctcaactggtatcagcagaagccagggcaggctcctcgcct |
| scFv-nt | | gctgatctaccacaccagccgcctccacagcggtatccccgccagattttccgggagcgggtctgg |
| | | aaccgactacaccctcaccatctcttctctgcagcccgaggatttcgccgtctatttctgccagcagg |
| | | ggaatactctgccgtacaccttcggtcaaggtaccaagctggaaatcaagggaggcggaggatca |
| | | ggcggtggcggaagcggaggaggtggctccggaggaggaggttcccaagtgcagcttcaagaa |
| | | tcaggacccggacttgtgaagccatcagaaaccctctccctgacttgtaccgtgtccggtgtgagcc |
| | | tccccgactacggagtctcttggattcgccagcctccggggaagggtcttgaatggattggggtgat |
| | | ttggggatcagagactacttactactcttcatcacttaagtcacgggtcaccatcagcaaagataata |
| | | gcaagaaccaagtgtcacttaagctgtcatctgtgaccgccgctgacaccgccgtgtactattgtgc |
| | | caaacattactattacggagggtcttatgctatggactactggggacaggggaccctggtgactgtct |
| | | ctagccatcaccatcaccaccatcatcac |
| 99789 | 738 | MALPVTALLLPLALLLHAARPeivmtqspatlslspgeratlscrasqdiskyl |
| CAR5- | | nwyqqkpgqaprlliyhtsrlhsgiparfsgsgsgtdytltisslqpedfavyfcqqgntlpytfgq |
| Soluble | | gtkleikggggsggggsggggsggggsqvqlqesgpglvkpsetlsltctvsgvslpdygvswi |
| scFv-aa | | rqppgkglewigviwgsettyyssslksrvtiskdnsknqvslklssvtaadtavyycakhyyy |
| | | ggsyamdywgqgtlvtvsshhhhhhhh |
| 104879 | 750 | atggccctccctgtcaccgccctgctgcttccgctggctcttctgctccacgccgctcggcccgaaa |
| CAR 5- | | ttgtgatgacccagtcacccgccactcttagcctttcacccggtgagcgcgcaaccctgtcttgcag |
| Full-nt | | agcctcccaagacatctcaaaataccttaattggtatcaacagaagcccggacaggctcctcgcctt |
| | | ctgatctaccacaccagccggctccattctggaatccctgccaggttcagcggtagcggatctggg |
| | | accgactacaccctcactatcagctcactgcagccagaggacttcgctgtctatttctgtcagcaagg |
| | | gaacaccctgccctacacctttggacagggcaccaagctcgagattaaaggtggaggtggcagcg |
| | | gaggaggtgggtccggcggtggaggaagcggcggaggcgggagccaggtccaactccaaga |
| | | aagcggaccgggtcttgtgaagccatcagaaactctttcactgacttgtactgtgagcggagtgtctc |
| | | tccccgattacggggtgtcttggatcagacagccaccggggaagggtctggaatggattggagtg |
| | | atttggggctctgagactacttactactcttcatccctcaagtcacgcgtcaccatctcaaaggacaac |
| | | tctaagaatcaggtgtcactgaaactgtcatctgtgaccgcagccgacaccgccgtgtactattgcg |
| | | ctaagcattactattatggcgggagctacgcaatggattactggggacagggtactctggtcaccgt |
| | | gtccagcaccactaccccagcaccgaggccacccaccccggctcctaccatcgcctcccagcctc |
| | | tgtccctgcgtccggaggcatgtagacccgcagctggtggggccgtgcatacccggggtcttgact |
| | | tcgcctgcgatatctacatttgggcccctctggctggtacttgcggggtcctgctgctttcactcgtgat |
| | | cactctttactgtaagcgcggtcggaagaagctgctgtacatctttaagcaacccttcatgaggcctg |
| | | tgcagactactcaagaggaggacggctgttcatgccggttcccagaggaggaggaaggcggctg |
| | | cgaactgcgcgtgaaattcagccgcagcgcagatgctccagcctacaagcaggggcagaaccag |
| | | ctctacaacgaactcaatcttggtcggagagaggagtacgacgtgctggacaagcggagaggac |
| | | gggacccagaaatgggcgggaagccgcgcagaaagaatccccaagagggcctgtacaacgag |
| | | ctccaaaaggataagatggcagaagcctatagcgagattggtatgaaaggggaacgcagaagag |
| | | gcaaaggccacgacggactgtaccagggactcagcaccgccaccaaggacacctatgacgctct |
| | | tcacatgcaggccctgccgcctcgg |
| 104879 | 762 | MALPVTALLLPLALLLHAARPeivmtqspatlslspgeratlscrasqdiskyln |
| CAR 5- | | wyqqkpgqaprlliyhtsrlhsgiparfsgsgsgtdytltisslqpedfavyfcqqgntlpytfgq |
| Full-aa | | gtkleikggggsggggsggggsggggsqvqlqesgpglykpsetlsltctvsgyslpdygvswi |
| | | rqppgkglewigviwgsettyyssslksrvtiskdnsknqvslklssytaadtavyycakhyyy |
| | | ggsyamdywgqgtlvtvsstttpaprpptpaptiasqplslrpeacrpaaggavhtrgldfacdi |
| | | yiwaplagtcgvlllslvitlyckrgrkkllyifkqpfmrpvqttqeedgcscrfpeeeeggcelrv |
| | | kfsrsadapaykqgqnqlynelnlgrreeydvldkrrgrdpemggkprrknpqeglynelqkd |
| | | kmaeayseigmkgerrrgkghdglyqglstatkdtydalhmqalppr |

CAR 6

| | | |
|---|---|---|
| CAR6 | 715 | eivmtqspatlslspgeratlscrasqdiskylnwyqqkpgqaprlliyhtsrlhsgiparfsgsgs |
| scFv | | gtdytltisslqpedfavyfcqqgntlpytfgqgtkleikggggsggggsggggsggggsqvqlq |
| domain | | esgpglvkpsetlsltctvsgvslpdygvswirqppgkglewigviwgsettyyqsslksrvtisk |
| | | dnsknqvslklssvtaadtavyycakhyyyggsyamdywgqgtlvtvss |
| 99790 | 727 | atggccctcccagtgaccgctctgctgctgcctctcgcacttcttctccatgccgctcggcctgagat |
| CAR6- | | cgtcatgacccaaagccccgctaccctgtccctgtcacccggcgagagggcaaccctttcatgcag |
| Soluble | | ggccagccaggacatttctaagtacctcaactggtatcagcagaagccagggcaggctcctcgcct |
| scFv-nt | | gctgatctaccacaccagccgcctccacagcggtatccccgccagattttccgggagcgggtctgg |
| | | aaccgactacaccctcaccatctcttctctgcagcccgaggatttcgccgtctatttctgccagcagg |
| | | ggaatactctgccgtacaccttcggtcaaggtaccaagctggaaatcaagggaggcggaggatca |
| | | ggcggtggcggaagcggaggaggtggctccggaggaggaggttcccaagtgcagcttcaagaa |
| | | tcaggacccggacttgtgaagccatcagaaaccctctccctgacttgtaccgtgtccggtgtgagcc |
| | | tccccgactacggagtctcttggattcgccagcctccggggaagggtcttgaatggattggggtgat |
| | | ttggggatcagagactacttactaccagtcatcacttaagtcacgggtcaccatcagcaaagataata |
| | | gcaagaaccaagtgtcacttaagctgtcatctgtgaccgccgctgacaccgccgtgtactattgtgc |
| | | caaacattactattacggagggtcttatgctatggactactggggacaggggaccctggtgactgtct |
| | | ctagccatcaccatcaccaccatcatcac |
| 99790 | 739 | MALPVTALLLPLALLLHAARPeivmtqspatlslspgeratlscrasqdiskyl |
| CAR6- | | nwyqqkpgqaprlliyhtsrlhsgiparfsgsgsgtdytltisslqpedfavyfcqqgntlpytfgq |
| Soluble | | gtkleikggggsggggsggggsggggsqvqlqesgpglvkpsetlsltctvsgvslpdygvswi |
| scFv-aa | | rqppgkglewigviwgsettyyqsslksrvtiskdnsknqvslklssvtaadtavyycakhyyy |
| | | ggsyamdywgqgtlvtvsshhhhhhhh |
| 104880 | 751 | atggccctccctgtcaccgccctgctgcttccgctggctcttctgctccacgccgctcggcccgaaa |
| CAR6- | | ttgtgatgacccagtcacccgccactcttagcctttcacccggtgagcgcgcaaccctgtcttgcag |
| Full-nt | | agcctcccaagacatctcaaaataccttaattggtatcaacagaagcccggacaggctcctcgcctt |
| | | ctgatctaccacaccagccggctccattctggaatccctgccaggttcagcggtagcggatctggg |
| | | accgactacaccctcactatcagctcactgcagccagaggacttcgctgtctatttctgtcagcaagg |
| | | gaacaccctgccctacacctttggacagggcaccaagctcgagattaaaggtggaggtggcagcg |
| | | gaggaggtgggtccggcggtggaggaagcggaggcggagggagccaggtccaactccaaga |
| | | aagcggaccgggtcttgtgaagccatcagaaactctttcactgacttgtactgtgagcggagtgtctc |
| | | tccccgattacggggtgtcttggatcagacagccaccggggaagggtctggaatggattggagtg |
| | | atttggggctctgagactacttactaccaatcatccctcaagtcacgcgtcaccatctcaaaggacaa |
| | | ctctaagaatcaggtgtcactgaaactgtcatctgtgaccgcagccgacaccgccgtgtactattgc |
| | | gctaagcattactattatggcgggagctacgcaatggattactggggacagggtactctggtcaccg |
| | | tgtccagcaccactaccccagcaccgaggccacccaccccggctcctaccatcgcctcccagcct |
| | | ctgtccctgcgtccggaggcatgtagacccgcagctggtggggccgtgcatacccggggtcttga |
| | | cttcgcctgcgatatctacatttgggcccctctggctggtacttgcggggtcctgctgctttcactcgtg |
| | | atcactctttactgtaagcgcggtcggaagaagctgctgtacatctttaagcaacccttcatgaggcct |
| | | gtgcagactactcaagaggaggacggctgttcatgccggttcccagaggaggaggaaggcggct |
| | | gcgaactgcgcgtgaaattcagccgcagcgcagatgctccagcctacaagcaggggcagaacca |
| | | gctctacaacgaactcaatcttggtcggagagaggagtacgacgtgctggacaagcggagagga |
| | | cgggacccagaaatgggcgggaagccgcgcagaaagaatccccaagagggcctgtacaacga |
| | | gctccaaaaggataagatggcagaagcctatagcgagattggtatgaaaggggaacgcagaaga |
| | | ggcaaaggccacgacggactgtaccagggactcagcaccgccaccaaggacacctatgacgct |
| | | cttcacatgcaggccctgccgcctcgg |
| 104880 | 763 | MALPVTALLLPLALLLHAARPeivmtqspatlslspgeratlscrasadiskyln |
| CAR6- | | wyqqkpgqaprlliyhtsrlhsgiparfsgsgsgtdytltisslqpedfavyfcqqgntlpytfgq |
| Full-aa | | gtkleikggggsggggsggggsggggsqvqlqesgpglvkpsetlsltctvsgvslpdygvswi |
| | | rqppgkglewigviwgsettyyqsslksrvtiskdnsknqvslklssvtaadtavyycakhyyy |
| | | ggsyamdywgqgtlvtvsstttpaprpptpaptiasqplslrpeacrpaaggavhtrgldfacdi |
| | | yiwaplagtcgvlllslvitlyckrgrkkllyifkqpfmrpvqttqeedgcscrfpeeeeggcelrv |
| | | kfsrsadapaykqgqnqlynelnlgrreeydvldkrrgrdpemggkprrknpqeglynelqkd |
| | | kmaeayseigmkgerrrgkghdglyqglstatkdtydalhmqalppr |

CAR 7

| | | |
|---|---|---|
| CAR7 | 716 | qvqlqesgpglvkpsetlsltctvsgvslpdygvswirqppgkglewigviwgsettyyssslks |
| scFv | | rvtiskdnsknqvslklssvtaadtavyycakhyyyggsyamdywgqgtlvtvssggggsgg |
| domain | | ggsggggsggggseivmtqspatlslspgeratlscrasqdiskylnwyqqkpgqaprlliyhts |
| | | rlhsgiparfsgsgsgtdytltisslqpedfavyfcqqgntlpytfgqgtkleik |
| 100796 | 728 | atggcactgcctgtcactgccctcctgctgcctctggccctccttctgcatgccgccaggccccaag |
| CAR7- | | tccagctgcaagagtcaggacccggactggtgaagccgtctgagactctctcactgacttgtaccgt |
| Soluble | | cagcggcgtgtccctccccgactacggagtgtcatggatccgccaacctcccgggaaagggcttg |
| scFv-nt | | aatggattggtgtcatctggggttctgaaaccacctactactcatcttccctgaagtccagggtgacc |
| | | atcagcaaggataattccaagaaccaggtcagccttaagctgtcatctgtgaccgctgctgacaccg |
| | | ccgtgtattactgcgccaagcactactattacggaggaagctacgctatggactattggggacagg |
| | | gcactctcgtgactgtgagcagcggcggtggagggtctggaggtggaggatccggtggtggtgg |
| | | gtcaggcggaggagggagcgagattgtgatgactcagtcaccagccaccctttctctttcacccgg |
| | | cgagagagcaaccctgagctgtagagccagccaggacatttctaagtacctcaactggtatcagca |
| | | aaaaccggggcaggcccctcgcctcctgatctaccatacctcacgccttcactctggtatccccgct |
| | | cggtttagcggatcaggatctggtaccgactacactctgaccatttccagcctgcagccagaagattt |
| | | cgcagtgtatttctgccagcagggcaatacccttccttacaccttcggtcagggaaccaagctcgaa |
| | | atcaagcaccatcaccatcatcaccaccat |
| 100796 | 740 | MALPVTALLLPLALLLHAARPqvqlqesgpglvkpsetlsltctvsgvslpdy |
| CAR7- | | gvswirqppgkglewigviwgsettyyssslksrvtiskdnsknqvslklssvtaadtavyycak |
| Soluble | | hyyyggsyamdywgqgtlvtvssggggsggggsggggsggggseivmtqspatlslspger |
| scFv-aa | | atlscrasqdiskylnwyqqkpgqaprlliyhtsrlhsgiparfsgsgsgtdytltisslqpedfavy |
| | | fcqqgntlpytfgqgtkleikhhhhhhhh |
| 104881 | 752 | atggctctgcccgtgaccgcactcctcctgccactggctctgctgcttcacgccgctcgcccacaag |
| CAR 7 | | tccagcttcaagaatcagggcctggtctggtgaagccatctgagactctgtccctcacttgcaccgtg |
| Full-nt | | agcggagtgtccctcccagactacggagtgagctggattagacagcctcccggaaagggactgg |
| | | agtggatcggagtgatttggggtagcgaaaccacttactattcatcttccctgaagtcacgggtcacc |
| | | atttcaaaggataactcaaagaatcaagtgagcctcaagctctcatcagtcaccgccgctgacaccg |
| | | ccgtgtattactgtgccaagcattactactatggagggtcctacgccatggactactggggccaggg |
| | | aactctggtcactgtgtcatctggtggaggaggtagcggaggaggcgggagcggtggaggtggc |
| | | tccggaggtggcggaagcgaaatcgtgatgacccagagccctgcaaccctgtccctttctcccgg |
| | | ggaacgggctaccctttcttgtcgggcatcacaagatatctcaaaatacctcaattggtatcaacaga |
| | | agccgggacaggcccctaggcttcttatctaccacacctctcgcctgcatagcgggattcccgcac |
| | | gctttagcgggtctggaagcgggaccgactacactctgaccatctcatctctccagcccgaggactt |
| | | cgccgtctacttctgccagcagggtaacaccctgccgtacaccttcggccagggcaccaagcttga |
| | | gatcaaaaccactactcccgctccaaggccacccacccctgccccgaccatcgcctctcagccgct |
| | | ttccctgcgtccggaggcatgtagacccgcagctggtggggccgtgcatacccggggtcttgactt |
| | | cgcctgcgatatctacatttgggcccctctggctggtacttgcggggtcctgctgctttcactcgtgat |
| | | cactctttactgtaagcgcggtcggaagaagctgctgtacatctttaagcaacccttcatgaggcctg |
| | | tgcagactactcaagaggaggacggctgttcatgccggttcccagaggaggaggaaggcggctg |
| | | cgaactgcgcgtgaaattcagccgcagcgcagatgctccagcctacaagcaggggcagaaccag |
| | | ctctacaacgaactcaatcttggtcggagagaggagtacgacgtgctggacaagcggagaggac |
| | | gggacccagaaatgggcgggaagccgcgcagaaagaatccccaagagggcctgtacaacgag |
| | | ctccaaaaggataagatggcagaagcctatagcgagattggtatgaaaggggaacgcagaagag |
| | | gcaaaggccacgacggactgtaccagggactcagcaccgccaccaaggacacctatgacgctct |
| | | tcacatgcaggccctgccgcctcgg |
| 104881 | 764 | MALPVTALLLPLALLLHAARPqvqlqesgpglvkpsetlsltctvsgvslpdygv |
| CAR 7 | | swirqppgkglewigviwgsettyyssslksrvtiskdnsknqvslklssvtaadtavyycakh |
| Full-aa | | yyyggsyamdywgqgtlvtvssggggsggggsggggsggggseivmtqspatlslspgera |
| | | tlscrasqdiskylnwyqqkpgqaprlliyhtsrlhsgiparfsgsgsgtdytltisslqpedfav |
| | | yfcqqgntlpytfgqgtkleiktttpaprpptpaptiasqplslrpeacrpaaggavhtrgldfacd |
| | | iyiwaplagtcgvlllslvitlyckrgrkkllyifkqpfmrpvqttqeedgcscrfpeeeeggcelr |
| | | vkfsrsadapaykqgqnqlynelnlgrreeydvldkrrgrdpemggkprrknpqeglynelqk |
| | | dkmaeayseigmkgerrrgkghdglyqglstatkdtydalhmqalppr |

CAR 8

| | | |
|---|---|---|
| CAR8 | 717 | qvqlqesgpglvkpsetlsltctvsgvslpdygvswirqppgkglewigviwgsettyyqsslks |
| scFv | | rvtiskdnsknqvslklssvtaadtavyycakhyyyggsyamdywgqgtlvtvssggggsgg |
| domain | | ggsggggsggggseivmtqspatlslspgeratlscrasqdiskylnwyqqkpgqaprlliyhts |
| | | rlhsgiparfsgsgsgtdytltisslqpedfavyfcqqgntlpytfgqgtkleik |
| 100798 | 729 | atggcactgcctgtcactgccctcctgctgcctctggccctccttctgcatgccgccaggccccaag |
| CAR8- | | tccagctgcaagagtcaggacccggactggtgaagccgtctgagactctctcactgacttgtaccgt |
| Soluble | | cagcggcgtgtccctccccgactacggagtgtcatggatccgccaacctcccgggaaagggcttg |
| scFv-nt | | aatggattggtgtcatctggggttctgaaaccacctactaccagtcttccctgaagtccagggtgacc |
| | | atcagcaaggataattccaagaaccaggtcagccttaagctgtcatctgtgaccgctgctgacaccg |
| | | ccgtgtattactgcgccaagcactactattacggaggaagctacgctatggactattggggacagg |
| | | gcactctcgtgactgtgagcagcggcggtggagggtctggaggtggaggatccggtggtggtgg |
| | | gtcaggcggaggagggagcgagattgtgatgactcagtcaccagccaccctttctctttcacccgg |
| | | cgagagagcaaccctgagctgtagagccagccaggacatttctaagtacctcaactggtatcagca |
| | | aaaaccggggcaggcccctcgcctcctgatctaccatacctcacgccttcactctggtatccccgct |
| | | cggtttagcggatcaggatctggtaccgactacactctgaccatttccagcctgcagccagaagattt |
| | | cgcagtgtatttctgccagcagggcaatacccttccttacaccttcggtcagggaaccaagctcgaa |
| | | atcaagcaccatcaccatcatcatcaccac |
| 100798 | 741 | MALPVTALLLPLALLLHAARPqvqlqesgpglvkpsetlsltctvsgvslpdy |
| CAR8- | | gvswirqppgkglewigviwgsettyyqsslksrvtiskdnsknqvslklssvtaadtavyyca |
| Soluble | | khyyyggsyamdywgqgtlvtvssggggsggggsggggsggggseivmtqspatlslspge |
| scFv-aa | | ratlscrasqdiskylnwyqqkpgqaprlliyhtsrlhsgiparfsgsgsgtdytltisslqpedfav |
| | | yfcqqgntlpytfgqgtkleikhhhhhhhh |
| 104882 | 753 | atggctctgcccgtgaccgcactcctcctgccactggctctgctgcttcacgccgctcgcccacaag |
| CAR 8- | | tccagcttcaagaatcagggcctggtctggtgaagccatctgagactctgtccctcacttgcaccgtg |
| Full-nt | | agcggagtgtccctcccagactacggagtgagctggattagacagcctcccggaaagggactgg |
| | | agtggatcggagtgatttggggtagcgaaaccacttactatcaatcttccctgaagtcacgggtcac |
| | | catttcaaaggataactcaaagaatcaagtgagcctcaagctctcatcagtcaccgccgctgacacc |
| | | gccgtgtattactgtgccaagcattactactatggagggtcctacgccatggactactggggccagg |
| | | gaactctggtcactgtgtcatctggtggaggaggtagcggaggaggcgggagcggtggaggtgg |
| | | ctccggaggcggtgggtcagaaatcgtgatgacccagagccctgcaaccctgtccctttctcccgg |
| | | ggaacgggctaccctttcttgtcgggcatcacaagatatctcaaaatacctcaattggtatcaacaga |
| | | agccgggacaggcccctaggcttcttatctaccacacctctcgcctgcatagcgggattcccgcac |
| | | gctttagcgggtctggaagcgggaccgactacactctgaccatctcatctctccagcccgaggactt |
| | | cgccgtctacttctgccagcagggtaacaccctgccgtacaccttcggccagggcaccaagcttga |
| | | gatcaaaaccactactcccgctccaaggccacccacccctgccccgaccatcgcctctcagccgct |
| | | ttccctgcgtccggaggcatgtagacccgcagctggtggggccgtgcatacccggggtcttgactt |
| | | cgcctgcgatatctacatttgggcccctctggctggtacttgcggggtcctgctgctttcactcgtgat |
| | | cactctttactgtaagcgcggtcggaagaagctgctgtacatctttaagcaacccttcatgaggcctg |
| | | tgcagactactcaagaggaggacggctgttcatgccggttcccagaggaggaggaaggcggctg |
| | | cgaactgcgcgtgaaattcagccgcagcgcagatgctccagcctacaagcaggggcagaaccag |
| | | ctctacaacgaactcaatcttggtcggagagaggagtacgacgtgctggacaagcggagaggac |
| | | gggacccagaaatgggcgggaagccgcgcagaaagaatccccaagagggcctgtacaacgag |
| | | ctccaaaaggataagatggcagaagcctatagcgagattggtatgaaaggggaacgcagaagag |
| | | gcaaaggccacgacggactgtaccagggactcagcaccgccaccaaggacacctatgacgctct |
| | | tcacatgcaggccctgccgcctcgg |
| 104882 | 765 | MALPVTALLLPLALLLHAARPqvqlqesgpglvkpsetlsltctvsgvslpdygv |
| CAR 8- | | swirqppgkglewigviwgsettyyqsslksrvtiskdnsknqvslklssvtaadtavyycakh |
| Full-aa | | yyyggsyamdywgqgtlvtvssggggsggggsggggsggggseivmtqspatlslspgera |
| | | tlscrasqdiskylnwyqqkpgqaprlliyhtsrlhsgiparfsgsgsgtdytltisslqpedfav |
| | | yfcqqgntlpytfgqgtkleiktttpaprpptpaptiasqplslrpeacrpaaggavhtrgldfacd |
| | | iyiwaplagtcgvlllslvitlyckrgrkkllyifkqpfmrpvqttqeedgcscrfpeeeeggcelr |
| | | vkfsrsadapaykqgqnqlynelnlgrreeydvldkrrgrdpemggkprrknpqeglynelqk |
| | | dkmaeayseigmkgerrrgkghdglyqglstatkdtydalhmqalppr |

CAR 9

| | | |
|---|---|---|
| CAR9 | 718 | eivmtqspatlslspgeratlscrasqdiskylnwyqqkpgqaprlliyhtsrlhsgiparfsgsgs |
| scFv | | gtdytltisslqpedfavyfcqqgntlpytfgqgtkleikggggsggggsggggsggggsqvqlq |
| domain | | esgpglvkpsetlsltctvsgvslpdygvswirqppgkglewigviwgsettyynsslksrvtisk |
| | | dnsknqvslklssvtaadtavyycakhyyyggsyamdywgqgtlvtvss |
| 99789 | 730 | atggccctcccagtgaccgctctgctgctgcctctcgcacttcttctccatgccgctcggcctgagat |
| CAR9- | | cgtcatgacccaaagccccgctaccctgtccctgtcacccggcgagagggcaaccctttcatgcag |
| Soluble | | ggccagccaggacatttctaagtacctcaactggtatcagcagaagccagggcaggctcctcgcct |
| scFv-nt | | gctgatctaccacaccagccgcctccacagcggtatccccgccagattttccgggagcgggtctgg |
| | | aaccgactacaccctcaccatctcttctctgcagcccgaggatttcgccgtctatttctgccagcagg |
| | | ggaatactctgccgtacaccttcggtcaaggtaccaagctggaaatcaagggaggcggaggatca |
| | | ggcggtggcggaagcggaggaggtggctccggaggaggaggttcccaagtgcagcttcaagaa |
| | | tcaggacccggacttgtgaagccatcagaaaccctctccctgacttgtaccgtgtccggtgtgagcc |
| | | tccccgactacggagtctcttggattcgccagcctccggggaagggtcttgaatggattggggtgat |
| | | ttggggatcagagactacttactacaattcatcacttaagtcacgggtcaccatcagcaaagataata |
| | | gcaagaaccaagtgtcacttaagctgtcatctgtgaccgccgctgacaccgccgtgtactattgtgc |
| | | caaacattactattacggagggtcttatgctatggactactggggacaggggaccctggtgactgtct |
| | | ctagccatcaccatcaccaccatcatcac |
| 99789 | 742 | MALPVTALLLPLALLLHAARPeivmtqspatlslspgeratlscrasqdiskyl |
| CAR9- | | nwyqqkpgqaprlliyhtsrlhsgiparfsgsgsgtdytltisslqpedfavyfcqqgntlpytfgq |
| Soluble | | gtkleikggggsggggsggggsggggsqvqlqesgpglvkpsetlsltctvsgvslpdygvswi |
| scFv-aa | | rqppgkglewigviwgsettyynsslksrvtiskdnsknqvslklssvtaadtavyycakhyyy |
| | | ggsyamdywgqgtlvtvsshhhhhhhh |
| 105974 | 754 | atggccctccctgtcaccgccctgctgcttccgctggctcttctgctccacgccgctcggcccgaaa |
| CAR 9- | | ttgtgatgacccagtcacccgccactcttagcctttcacccggtgagcgcgcaaccctgtcttgcag |
| Full-nt | | agcctcccaagacatctcaaaataccttaattggtatcaacagaagcccggacaggctcctcgcctt |
| | | ctgatctaccacaccagccggctccattctggaatccctgccaggttcagcggtagcggatctggg |
| | | accgactacaccctcactatcagctcactgcagccagaggacttcgctgtctatttctgtcagcaagg |
| | | gaacaccctgccctacacctttggacagggcaccaagctcgagattaaaggtggaggtggcagcg |
| | | gaggaggtgggtccggcggtggaggaagcggaggcggtgggagccaggtccaactccaagaa |
| | | agcggaccgggtcttgtgaagccatcagaaactctttcactgacttgtactgtgagcggagtgtctct |
| | | ccccgattacggggtgtcttggatcagacagccaccggggaagggtctggaatggattggagtga |
| | | tttggggctctgagactacttactacaactcatccctcaagtcacgcgtcaccatctcaaaggacaac |
| | | tctaagaatcaggtgtcactgaaactgtcatctgtgaccgcagccgacaccgccgtgtactattgcg |
| | | ctaagcattactattatggcgggagctacgcaatggattactggggacagggtactctggtcaccgt |
| | | gtccagcaccactaccccagcaccgaggccacccaccccggctcctaccatcgcctcccagcctc |
| | | tgtccctgcgtccggaggcatgtagacccgcagctggtggggccgtgcatacccggggtcttgact |
| | | tcgcctgcgatatctacatttgggcccctctggctggtacttgcggggtcctgctgctttcactcgtgat |
| | | cactctttactgtaagcgcggtcggaagaagctgctgtacatctttaagcaacccttcatgaggcctg |
| | | tgcagactactcaagaggaggacggctgttcatgccggttcccagaggaggaggaaggcggctg |
| | | cgaactgcgcgtgaaattcagccgcagcgcagatgctccagcctacaagcaggggcagaaccag |
| | | ctctacaacgaactcaatcttggtcggagagaggagtacgacgtgctggacaagcggagaggac |
| | | gggacccagaaatgggcgggaagccgcgcagaaagaatccccaagagggcctgtacaacgag |
| | | ctccaaaaggataagatggcagaagcctatagcgagattggtatgaaaggggaacgcagaagag |
| | | gcaaaggccacgacggactgtaccagggactcagcaccgccaccaaggacacctatgacgctct |
| | | tcacatgcaggccctgccgcctcgg |
| 105974 | 766 | MALPVTALLLPLALLLHAARPeivrntqspatlslspgeratlscrasqdiskyln |
| CAR9- | | wyqqkpgqaprlliyhtsrlhsgiparfsgsgsgtdytltisslqpedfavyfcqqgntlpytfgq |
| Full-aa | | gtkleikggggsggggsggggsggggsqvqlqesgpglvkpsetlsltctvsgvslpdygvswi |
| | | rqppgkglewigviwgsettyynsslksrvtiskdnsknqvslklssvtaadtavyycakhyyy |
| | | ggsyamdywgqgtlvtvsstttpaprpptpaptiasqplslrpeacrpaaggavhtrgldfacdi |
| | | yiwaplagtcgvlllslvitlyckrgrkkllyifkqpfmrpvqttqeedgcscrfpeeeeggcelrv |
| | | kfsrsadapaykqgqnqlynelnlgrreeydvldkrrgrdpemggkprrknpqeglynelqkd |
| | | kmaeayseigmkgerrrgkghdglyqglstatkdtydalhmqalppr |

CAR10

| | | |
|---|---|---|
| CAR10 | 719 | qvqlqesgpglvkpsetlsltctvsgvslpdygvswirqppgkglewigviwgsettyynsslks |
| scFv | | rvtiskdnsknqvslklssvtaadtavyycakhyyyggsyamdywgqgtlvtvssggggsgg |
| domain | | ggsggggsggggseivmtqspatlslspgeratlscrasqdiskylnwyqqkpgqaprlliyhts |
| | | rlhsgiparfsgsgsgtdytltisslqpedfavyfcqqgntlpytfgqgtkleik |
| 100796 | 731 | atggcactgcctgtcactgccctcctgctgcctctggccctccttctgcatgccgccaggccccaag |
| CAR10- | | tccagctgcaagagtcaggacccggactggtgaagccgtctgagactctctcactgacttgtaccgt |
| Soluble | | cagcggcgtgtccctccccgactacggagtgtcatggatccgccaacctcccgggaaagggcttg |
| scFv-nt | | aatggattggtgtcatctggggttctgaaaccacctactacaactcttccctgaagtccagggtgacc |
| | | atcagcaaggataattccaagaaccaggtcagccttaagctgtcatctgtgaccgctgctgacaccg |
| | | ccgtgtattactgcgccaagcactactattacggaggaagctacgctatggactattggggacagg |
| | | gcactctcgtgactgtgagcagcggcggtggagggtctggaggtggaggatccggtggtggtgg |
| | | gtcaggcggaggagggagcgagattgtgatgactcagtcaccagccaccctttctctttcacccgg |
| | | gcaaaggccacgacggactgtaccagggactcagcaccgccaccaaggacacctatgacgctct |
| | | tcacatgcaggccctgccgcctcgg |
| 105975 | 767 | MALPVTALLLPLALLLHAARPEIVMTQSPATLSLSPGERATLSC |
| CAR 10 | | RASQDISKYLNWYQQKPGQAPRLLIYHTSRLHSGIPARFSGSG |
| Full-aa | | SGTDYTLTISSLQPEDFAVYFCQQGNTLPYTFGQGTKLEIKGG |
| | | GGSGGGGSGGGGSGGGGSQVQLQESGPGLVKPSETLSLTCTVS |
| | | GVSLPDYGVSWIRQPPGKGLEWIGVIWGSETTYYNSSLKSRV |
| | | TISKDNSKNQVSLKLSSVTAADTAVYYCAKHYYYGGSYAMD |
| | | YWGQGTLVTVSSTTTPAPRPPTPAPTIASQPLSLRPEACRPAAG |
| | | GAVHTRGLDFACDIYIWAPLAGTCGVLLLSLVITLYCKRGRKK |
| | | LLYIFKQPFMRPVQTTQEEDGCSCRFPEEEEGGCELRVKFSRSA |
| | | DAPAYKQGQNQLYNELNLGRREEYDVLDKRRGRDPEMGGKP |
| | | RRKNPQEGLYNELQKDKMAEAYSEIGMKGERRRGKGHDGLY |
| | | QGLSTATKDTYDALHMQALPPR |

CAR11

| | | |
|---|---|---|
| CAR11 | 720 | eivmtqspatlslspgeratlscrasqdiskylnwyqqkpgqaprlliyhtsrlhsgiparfsgsgs |
| scFv | | gtdytltisslqpedfavyfcqqgntlpytfgqgtkleikggggsggggsggggsqvqlqesgpg |
| domain | | lvkpsetlsltctvsgvslpdygvswirqppgkglewigviwgsettyynsslksrvtiskdnskn |
| | | qvslklssvtaadtavyycakhyyyggsyamdywgqgtlvtvss |
| 103101 | 732 | Atggccctccctgtcaccgccctgctgcttccgctggctcttctgctccacgccgctcggcccgaa |
| CAR11- | | attgtgatgacccagtcacccgccactcttagcctttcacccggtgagcgcgcaaccctgtcttgca |
| Soluble | | gagcctcccaagacatctcaaaataccttaattggtatcaacagaagcccggacaggctcctcgcct |
| scFv-nt | | tctgatctaccacaccagccggctccattctggaatccctgccaggttcagcggtagcggatctggg |
| | | accgactacaccctcactatcagctcactgcagccagaggacttcgctgtctatttctgtcagcaagg |
| | | gaacaccctgccctacacctttggacagggcaccaagctcgagattaaaggtggaggtggcagcg |
| | | gaggaggtgggtccggcggtggaggaagccaggtccaactccaagaaagcggaccgggtcttg |
| | | tgaagccatcagaaactctttcactgacttgtactgtgagcggagtgtctctccccgattacggggtgt |
| | | cttggatcagacagccaccggggaagggtctggaatggattggagtgatttggggctctgagacta |
| | | cttactacaattcatccctcaagtcacgcgtcaccatctcaaaggacaactctaagaatcaggtgtca |
| | | ctgaaactgtcatctgtgaccgcagccgacaccgccgtgtactattgcgctaagcattactattatgg |
| | | cgggagctacgcaatggattactggggacagggtactctggtcaccgtgtccagccaccaccatc |
| | | atcaccatcaccat |
| 103101 | 744 | MALPVTALLLPLALLLHAARPeivmtqspatlslspgeratlscrasqdiskyl |
| CAR11- | | nwyqqkpgqaprlliyhtsrlhsgiparfsgsgsgtdytltisslqpedfavyfcqqgntlpytfgq |
| Soluble | | gtkleikggggsggggsggggsqvqlqesgpglvkpsetlsltctvsgvslpdygvswirqppg |
| scFv-aa | | kglewigviwgsettyynsslksrvtiskdnsknqvslklssvtaadtavyycakhyyyggsya |
| | | mdywgqgtlvtvsshhhhhhhh |
| 105976 | 756 | atggctctgcccgtgaccgcactcctcctgccactggctctgctgcttcacgccgctcgcccacaag |
| CAR 11 | | tccagcttcaagaatcagggcctggtctggtgaagccatctgagactctgtccctcacttgcaccgtg |
| Full-nt | | agcggagtgtccctcccagactacggagtgagctggattagacagcctcccggaaagggactgg |
| | | agtggatcggagtgatttggggtagcgaaaccacttactataactcttccctgaagtcacgggtcac |
| | | catttcaaaggataactcaaagaatcaagtgagcctcaagctctcatcagtcaccgccgctgacacc |
| | | gccgtgtattactgtgccaagcattactactatggagggtcctacgccatggactactggggccagg |
| | | gaactctggtcactgtgtcatctggtggaggaggtagcggaggaggcgggagcggtggaggtgg |
| | | ctccggaggtggcggaagcgaaatcgtgatgacccagagccctgcaaccctgtccctttctcccg |
| | | gggaacgggctaccctttcttgtcgggcatcacaagatatctcaaaatacctcaattggtatcaacag |
| | | aagccgggacaggcccctaggcttcttatctaccacacctctcgcctgcatagcgggattcccgca |
| | | cgctttagcgggtctggaagcgggaccgactacactctgaccatctcatctctccagcccgaggac |
| | | ttcgccgtctacttctgccagcagggtaacaccctgccgtacaccttcggccagggcaccaagcttg |
| | | agatcaaaaccactactcccgctccaaggccacccacccctgccccgaccatcgcctctcagccg |
| | | ctttccctgcgtccggaggcatgtagacccgcagctggtggggccgtgcatacccggggtcttgac |
| | | ttcgcctgcgatatctacatttgggcccctctggctggtacttgcggggtcctgctgctttcactcgtga |
| | | tcactctttactgtaagcgcggtcggaagaagctgctgtacatctttaagcaacccttcatgaggcct |
| | | gtgcagactactcaagaggaggacggctgttcatgccggttcccagaggaggaggaaggcggct |
| | | gcgaactgcgcgtgaaattcagccgcagcgcagatgctccagcctacaagcaggggcagaacca |
| | | gctctacaacgaactcaatcttggtcggagagaggagtacgacgtgctggacaagcggagagga |
| | | cgggacccagaaatgggcgggaagccgcgcagaaagaatccccaagagggcctgtacaacga |
| | | gctccaaaaggataagatggcagaagcctatagcgagattggtatgaaaggggaacgcagaaga |
| | | ggcaaaggccacgacggactgtaccagggactcagcaccgccaccaaggacacctatgacgct |
| | | cttcacatgcaggccctgccgcctcgg |
| 105976 | 768 | MALPVTALLLPLALLLHAARPQVQLQESGPGLVKPSETLSLTC |
| CAR 11 | | TVSGVSLPDYGVSWIRQPPGKGLEWIGVIWGSETTYYNSSLK |
| Full-aa | | SRVTISKDNSKNQVSLKLSSVTAADTAVYYCAKHYYYGGSYA |
| | | MDYWGQGTLVTVSSGGGGSGGGGSGGGGSGGGGSEIVMTQS |
| | | PATLSLSPGERATLSCRASQDISKYLNWYQQKPGQAPRLLIYH |
| | | TSRLHSGIPARFSGSGSGTDYTLTISSLQPEDFAVYFCQQGNTL |
| | | PYTFGQGTKLEIKTTTPAPRPPTPAPTIASQPLSLRPEACRPAAG |
| | | GAVHTRGLDFACDIYIWAPLAGTCGVLLLSLVITLYCKRGRKK |
| | | LLYIFKQPFMRPVQTTQEEDGCSCRFPEEEEGGCELRVKFSRSA |
| | | DAPAYKQGQNQLYNELNLGRREEYDVLDKRRGRDPEMGGKP |
| | | RRKNPQEGLYNELQKDKMAEAYSEIGMKGERRRGKGHDGLY |
| | | QGLSTATKDTYDALHMQALPPR |

CAR12

| | | |
|---|---|---|
| CAR12 | 721 | qvqlqesgpglvkpsetlsltctvsgvslpdygvswirqppgkglewigviwgsettyynsslks |
| scFv | | rvtiskdnsknqvslklssvtaadtavyycakhyyyggsyamdywgqgtlvtvssggggsgg |
| domain | | ggsggggseivmtqspatlslspgeratlscrasqdiskylnwyqqkpgqaprlliyhtsrlhsgi |
| | | parfsgsgsgtdytltisslqpedfavyfcqqgntlpytfgqgtkleik |
| 103104 | 733 | atggctctgcccgtgaccgcactcctcctgccactggctctgctgcttcacgccgctcgcccacaag |
| CAR12- | | tccagcttcaagaatcagggcctggtctggtgaagccatctgagactctgtccctcacttgcaccgtg |
| Soluble | | agcggagtgtccctcccagactacggagtgagctggattagacagcctcccggaaagggactgg |
| scFv-nt | | agtggatcggagtgatttggggtagcgaaaccacttactataactcttccctgaagtcacgggtcac |
| | | catttcaaaggataactcaaagaatcaagtgagcctcaagctctcatcagtcaccgccgctgacacc |
| | | gccgtgtattactgtgccaagcattactactatggagggtcctacgccatggactactggggccagg |
| | | gaactctggtcactgtgtcatctggtggaggaggtagcggaggaggcgggagcggtggaggtgg |
| | | ctccgaaatcgtgatgacccagagccctgcaaccctgtccctttctcccggggaacgggctaccctt |
| | | tcttgtcgggcatcacaagatatctcaaaatacctcaattggtatcaacagaagccgggacaggccc |
| | | ctaggcttcttatctaccacacctctcgcctgcatagcgggattcccgcacgctttagcgggtctgga |
| | | agcgggaccgactacactctgaccatctcatctctccagcccgaggacttcgccgtctacttctgcc |
| | | agcagggtaacaccctgccgtacaccttcggccagggcaccaagcttgagatcaaacatcaccac |
| | | catcatcaccatcac |
| 103104 | 745 | MALPVTALLLPLALLLHAARPqvqlqesgpglvkpsetlsltctvsgvslpdy |
| CAR12- | | gvswirqppgkglewigviwgsettyynsslksrvtiskdnsknqvslklssvtaadtavyyca |
| Soluble | | khyyyggsyamdywgqgtlvtvssggggsggggsggggseivmtqspatlslspgeratlscr |
| scFv-aa | | asqdiskylnwyqqkpgqaprlliyhtsrlhsgiparfsgsgsgtdytltisslqpedfavyfcqqg |
| | | ntlpytfgqgtkleikhhhhhhhh |
| 105977 | 757 | atggccctccctgtcaccgccctgctgcttccgctggctcttctgctccacgccgctcggcccgaaa |
| CAR12- | | ttgtgatgacccagtcacccgccactcttagcctttcacccggtgagcgcgcaaccctgtcttgcag |
| Full-nt | | agcctcccaagacatctcaaaataccttaattggtatcaacagaagcccggacaggctcctcgcctt |
| | | ctgatctaccacaccagccggctccattctggaatccctgccaggttcagcggtagcggatctggg |
| | | accgactacaccctcactatcagctcactgcagccagaggacttcgctgtctatttctgtcagcaagg |
| | | gaacaccctgccctacacctttggacagggcaccaagctcgagattaaaggtggaggtggcagcg |
| | | gaggaggtgggtccggcggtggaggaagccaggtccaactccaagaaagcggaccgggtcttg |
| | | tgaagccatcagaaactctttcactgacttgtactgtgagcggagtgtctctccccgattacggggtgt |
| | | cttggatcagacagccaccggggaagggtctggaatggattggagtgatttggggctctgagacta |
| | | cttactacaactcatccctcaagtcacgcgtcaccatctcaaaggacaactctaagaatcaggtgtca |
| | | ctgaaactgtcatctgtgaccgcagccgacaccgccgtgtactattgcgctaagcattactattatgg |
| | | cgggagctacgcaatggattactggggacagggtactctggtcaccgtgtccagcaccactaccc |
| | | cagcaccgaggccacccaccccggctcctaccatcgcctcccagcctctgtccctgcgtccggag |
| | | gcatgtagacccgcagctggtggggccgtgcatacccggggtcttgacttcgcctgcgatatctac |
| | | atttgggcccctctggctggtacttgcggggtcctgctgctttcactcgtgatcactctttactgtaagc |
| | | gcggtcggaagaagctgctgtacatctttaagcaacccttcatgaggcctgtgcagactactcaaga |
| | | ggaggacggctgttcatgccggttcccagaggaggaggaaggcggctgcgaactgcgcgtgaa |
| | | attcagccgcagcgcagatgctccagcctacaagcaggggcagaaccagctctacaacgaactc |
| | | aatcttggtcggagagaggagtacgacgtgctggacaagcggagaggacgggacccagaaatg |
| | | ggcgggaagccgcgcagaaagaatccccaagagggcctgtacaacgagctccaaaaggataag |
| | | atggcagaagcctatagcgagattggtatgaaaggggaacgcagaagaggcaaaggccacgac |
| | | ggactgtaccagggactcagcaccgccaccaaggacacctatgacgctcttcacatgcaggccct |
| | | gccgcctcgg |
| 105977 | 769 | MALPVTALLLPLALLLHAARPEIVMTQSPATLSLSPGERATLSC |
| CAR12- | | RASQDISKYLNWYQQKPGQAPRLLIYHTSRLHSGIPARFSGSG |
| Full-aa | | SGTDYTLTISSLQPEDFAVYFCQQGNTLPYTFGQGTKLEIKGG |
| | | GGSGGGGSGGGGSQVQLQESGPGLVKPSETLSLTCTVSGVSLP |
| | | DYGVSWIRQPPGKGLEWIGVIWGSETTYYNSSLKSRVTISKD |
| | | NSKNQVSLKLSSVTAADTAVYYCAKHYYYGGSYAMDYWGQ |
| | | GTLVTVSSTTTPAPRPPTPAPTIASQPLSLRPEACRPAAGGAVH |
| | | TRGLDFACDIYIWAPLAGTCGVLLLSLVITLYCKRGRKKLLYIF |
| | | KQPFMRPVQTTQEEDGCSCRFPEEEEGGCELRVKFSRSADAPA |
| | | YKQGQNQLYNELNLGRREEYDVLDKRRGRDPEMGGKPRRKN |
| | | PQEGLYNELQKDKMAEAYSEIGMKGERRRGKGHDGLYQGLS |
| | | TATKDTYDALHMQALPPR |

TABLE 14A
Murine CD19 CAR Constructs
CTL019

| | | |
|---|---|---|
| CTL019- | 770 | Atggccctgcccgtcaccgctctgctgctgccccttgctctgcttcttcatgcagcaaggccggaca |
| Soluble | | tccagatgacccaaaccacctcatccctctctgcctctcttggagacagggtgaccatttcttgtcgc |
| scFv- | | gccagccaggacatcagcaagtatctgaactggtatcagcagaagccggacggaaccgtgaagc |
| Histag-nt | | tcctgatctaccatacctctcgcctgcatagcggcgtgccctcacgcttctctggaagcggatcagg |
| | | aaccgattattctctcactatttcaaatcttgagcaggaagatattgccacctatttctgccagcagggt |
| | | aataccctgccctacaccttcggaggagggaccaagctcgaaatcaccggtggaggaggcagcg |
| | | gcggtggagggtctggtggaggtggttctgaggtgaagctgcaagaatcaggccctggacttgtg |
| | | gccccttcacagtccctgagcgtgacttgcaccgtgtccggagtctccctgcccgactacggagtgt |
| | | catggatcagacaacctccacggaaaggactggaatggctcggtgtcatctggggtagcgaaact |
| | | acttactacaattcagccctcaaaagcaggctgactattatcaaggacaacagcaagtcccaagtctt |
| | | tcttaagatgaactcactccagactgacgacaccgcaatctactattgtgctaagcactactactacg |
| | | gaggatcctacgctatggattactggggacaaggtacttccgtcactgtctcttcacaccatcatcac |
| | | catcaccatcac |
| CTL019- | 771 | MALPVTALLLPLALLLHAARPdiqmtqttsslsaslgdrvtiscrasqdiskyl |
| Soluble | | nwyqqkpdgtvklliyhtsrlhsgvpsrfsgsgsgtdysltisnleqediatyfcqqgntlpytfgg |
| scFv- | | gtkleitggggsggggsggggsevklqesgpglvapsqslsvtctvsgvslpdygvswirqppr |
| Histag-aa | | kglewlgviwgsettyynsalksrltiikdnsksqvflkmnslqtddtaiyycakhyyyggsya |
| | | mdywgqgtsvtvsshhhhhhhh |
| CTL019 | 772 | atggccttaccagtgaccgccttgctcctgccgctggccttgctgctccacgccgccaggccggac |
| Full-nt | | atccagatgacacagactacatcctccctgtctgcctctctgggagacagagtcaccatcagttgca |
| | | gggcaagtcaggacattagtaaatatttaaattggtatcagcagaaaccagatggaactgttaaactc |
| | | ctgatctaccatacatcaagattacactcaggagtcccatcaaggttcagtggcagtgggtctggaa |
| | | cagattattctctcaccattagcaacctggagcaagaagatattgccacttacttttgccaacagggta |
| | | atacgcttccgtacacgttcggaggggggaccaagctggagatcacaggtggcggtggctcggg |
| | | cggtggtgggtcgggtggcggcggatctgaggtgaaactgcaggagtcaggacctggcctggtg |
| | | gcgccctcacagagcctgtccgtcacatgcactgtctcaggggtctcattacccgactatggtgtaa |
| | | gctggattcgccagcctccacgaaagggtctggagtggctgggagtaatatggggtagtgaaacc |
| | | acatactataattcagctctcaaatccagactgaccatcatcaaggacaactccaagagccaagtttt |
| | | cttaaaaatgaacagtctgcaaactgatgacacagccatttactactgtgccaaacattattactacgg |
| | | tggtagctatgctatggactactggggccaaggaacctcagtcaccgtctcctcaaccacgacgcc |
| | | agcgccgcgaccaccaacaccggcgcccaccatcgcgtcgcagcccctgtccctgcgcccaga |
| | | ggcgtgccggccagcggcggggggcgcagtgcacacgagggggctggacttcgcctgtgatat |
| | | ctacatctgggcgcccttggccgggacttgtggggtccttctcctgtcactggttatcaccctttactg |
| | | caaacggggcagaaagaaactcctgtatatattcaaacaaccatttatgagaccagtacaaactact |
| | | caagaggaagatggctgtagctgccgatttccagaagaagaagaaggaggatgtgaactgagagt |
| | | gaagttcagcaggagcgcagacgcccccgcgtacaagcagggccagaaccagctctataacga |
| | | gctcaatctaggacgaagagaggagtacgatgttttggacaagagacgtggccgggaccctgaga |
| | | tggggggaaagccgagaaggaagaaccctcaggaaggcctgtacaatgaactgcagaaagata |
| | | agatggcggaggcctacagtgagattgggatgaaaggcgagcgccggaggggcaaggggcac |
| | | gatggcctttaccagggtctcagtacagccaccaaggacacctacgacgcccttcacatgcaggcc |
| | | ctgccccctcgc |
| CTL019 | 773 | MALPVTALLLPLALLLHAARPdiqmtqttsslsaslgdrvtiscrasqdiskylnw |
| Full-aa | | yqqkpdgtvklliyhtsrlhsgvpsrfsgsgsgtdysltisnleqediatyfcqqgntlpytfgggtk |
| | | leitggggsggggsggggsevklqesgpglvapsqslsvtctvsgvslpdygvswirqpprkgl |
| | | ewlgviwgsettyynsalksrltiikdnsksqvflkmnslqtddtaiyycakhyyyggsyamd |
| | | ywgqgtsvtvsstttpaprpptpaptiasqplslrpeacrpaaggavhtrgldfacdiyiwaplagt |
| | | cgvlllslvitlyckrgrkkllyifkqpfmrpvqttqeedgcscrfpeeeeggcelrvkfsrsadap |
| | | aykqgqnqlynelnlgrreeydvldkrrgrdpemggkprrknpqeglynelqkdkmaeayse |
| | | igmkgerrrgkghdglyqglstatkdtydalhmqalppr |
| CTL019 | 774 | Diqmtqttsslsaslgdrvtiscrasqdiskylnwyqqkpdgtvklliyhtsrlhsgvpsrfsgsgs |
| scFv | | gtdysltisnleqediatyfcqqgntlpytfgggtkleitggggsggggsggggsevklqesgpgl |
| domain | | vapsqslsvtctvsgvslpdygvswirqpprkglewlgviwgsettyynsalksrltiikdnsksq |
| | | vflkmnslqtddtaiyycakhyyyggsyamdywgqgtsvtvss |
| mCAR1 | 775 | QVQLLESGAELVRPGSSVKISCKASGYAFSSYWMNWVKQRPG |
| scFv | | QGLEWIGQIYPGDGDTNYNGKFKGQATLTADKSSSTAYMQLS |
| | | GLTSEDSAVYSCARKTISSVVDFYFDYWGQGTTVTGGGSGGG |
| | | SGGGSGGGSELVLTQSPKFMSTSVGDRVSVTCKASQNVGTNV |
| | | AWYQQKPGQSPKPLIYSATYRNSGVPDRFTGSGSGTDFTLTIT |
| | | NVQSKDLADYFCQYNRYPYTSFFFTKLEIKRRS |
| mCAR1 | 776 | QVQLLESGAELVRPGSSVKISCKASGYAFSSYWMNWVKQRPG |
| Full-aa | | QGLEWIGQIYPGDGDTNYNGKFKGQATLTADKSSSTAYMQLS |
| | | GLTSEDSAVYSCARKTISSVVDFYFDYWGQGTTVTGGGSGGG |
| | | SGGGSGGGSELVLTQSPKFMSTSVGDRVSVTCKASQNVGTNV |
| | | AWYQQKPGQSPKPLIYSATYRNSGVPDRFTGSGSGTDFTLTIT |
| | | NVQSKDLADYFCQYNRYPYTSFFFTKLEIKRRSKIEVMYPPPYL |
| | | DNEKSNGTIIHVKGKHLCPSPLFPGPSKPFWVLVVVGGVLACY |
| | | SLLVTVAFIIFWVRSKRSRLLHSDYMNMTPRRPGPTRKHYQPY |
| | | APPRDFAAYRSRVKFSRSADAPAYQQGQNQLYNELNLGRREE |
| | | YDVLDKRRGRDPEMGGKPRRKNPQEGLYNELQKDKMAEAYS |
| | | EIGMKGERRRGKGHDGLYQGLSTATKDTYDALHMQALPPR |
| mCAR2 | 777 | DIQMTQTTSSLSASLGDRVTISCRASQDISKYLNWYQQKPDGT |
| scFv | | VKLLIYHTSRLHSGVPSRFSGSGSGTDYSLTISNLEQEDIATYFC |
| | | QQGNTLPYTFGGGTKLEITGSTSGSGKPGSGEGSTKGEVKLQE |
| | | SGPGLVAPSQSLSVTCTVSGVSLPDYGVSWIRQPPRKGLEWLG |
| | | VIWGSETTYYNSALKSRLTIIKDNSKSQVFLKMNSLQTDDTAIY |
| | | YCAKHYYYGGSYAMDYWGQGTSVTVSSE |
| mCAR2 | 778 | DIQMTQTTSSLSASLGDRVTISCRASQDISKYLNWYQQKPDGT |
| CAR-aa | | VKLLIYHTSRLHSGVPSRFSGSGSGTDYSLTISNLEQEDIATYFC |
| | | QQGNTLPYTFGGGTKLEITGSTSGSGKPGSGEGSTKGEVKLQE |
| | | SGPGLVAPSQSLSVTCTVSGVSLPDYGVSWIRQPPRKGLEWLG |
| | | VIWGSETTYYNSALKSRLTIIKDNSKSQVFLKMNSLQTDDTAIY |
| | | YCAKHYYYGGSYAMDYWGQGTSVTVSSESKYGPPCPPCPMF |
| | | WVLVVVGGVLACYSLLVTVAFIIFWVKRGRKKLLYIFKQPFM |
| | | RPVQTTQEEDGCSCRFEEEEGGCELRVKFSRSADAPAYQQGQ |
| | | NQLYNELNLGRREEYDVLDKRRGRDPEMGGKPRRKNPQEGL |
| | | YNELQKDKMAEAYSEIGMKGERRRGKGHDGLYQGLSTATKD |
| | | TYDALHMQALPPRL |
| mCAR2 | 779 | DIQMTQTT SSLSASLGDR VTISCRASQD ISKYLNWYQQ |
| Full-aa | | KPDGTVKLLI YHTSRLHSGV PSRFSGSGSG TDYSLTISNL |
| | | EQEDIATYFC QQGNTLPYTF GGGTKLEITG STSGSGKPGS |
| | | GEGSTKGEVK LQESGPGLVA PSQSLSVTCT VSGVSLPDYG |
| | | VSWIRQPPRK GLEWLGVIWG SETTYYNSAL KSRLTIIKDN |
| | | SKSQVFLKMN SLQTDDTAIY YCAKHYYYGG |
| | | SYAMDYWGQG TSVTVSSESK YGPPCPPCPM FWVLVVVGGV |
| | | LACYSLLVTV |
| | | AFIIFWVKRG RKKLLYIFKQ PFMRPVQTTQ EEDGCSCRFE |
| | | EEEGGCELRV KFSRSADAPA YQQGQNQLYN ELNLGRREEY |
| | | DVLDKRRGRD PEMGGKPRRK NPQEGLYNEL QKDKMAEAYS |
| | | EIGMKGERRR GKGHDGLYQG LSTATKDTYD ALHMQALPPR |
| | | LEGGGEGRGS LLTCGDVEEN PGPRMLLLVT SLLLCELPHP |
| | | AFLLIPRKVC NGIGIGEFKD SLSINATNIK HFKNCTSISG |
| | | DLHILPVAFR GDSFTHTPPL DPQELDILKT VKEITGFLLI |
| | | QAWPENRTDL HAFENLEIIR |
| | | GRTKQHGQFS LAVVSLNITS LGLRSLKEIS DGDVIISGNK |
| | | NLCYANTINW KKLFGTSGQK TKIISNRGEN SCKATGQVCH |
| | | ALCSPEGCWG PEPRDCVSCR NVSRGRECVD KCNLLEGEPR |
| | | EFVENSECIQ CHPECLPQAM NITCTGRGPD NCIQCAHYID |
| | | GPHCVKTCPA GVMGENNTLV WKYADAGHVC |
| | | HLCHPNCTYG CTGPGLEGCP TNGPKIPSIA TGMVGALLLL |
| | | LVVALGIGLF M |
| mCAR3 | 780 | DIQMTQTTSSLSASLGDRVTISCRASQDISKYLNWYQQKPDGT |
| scFv | | VKLLIYHTSRLHSGVPSRFSGSGSGTDYSLTISNLEQEDIATYFC |
| | | QQGNTLPYTFGGGTKLEITGSTSGSGKPGSGEGSTKGEVKLQE |
| | | SGPGLVAPSQSLSVTCTVSGVSLPDYGVSWIRQPPRKGLEWLG |
| | | VIWGSETTYYNSALKSRLTIIKDNSKSQVFLKMNSLQTDDTAIY |
| | | YCAKHYYYGGSYAMDYWGQGTSVTVSS |
| mCAR3 | 781 | DIQMTQTTSSLSASLGDRVTISCRASQDISKYLNWYQQKPDGT |
| Full-aa | | VKLLIYHTSRLHSGVPSRFSGSGSGTDYSLTISNLEQEDIATYFC |
| | | QQGNTLPYTFGGGTKLEITGSTSGSGKPGSGEGSTKGEVKLQE |
| | | SGPGLVAPSQSLSVTCTVSGVSLPDYGVSWIRQPPRKGLEWLG |
| | | VIWGSETTYYNSALKSRLTIIKDNSKSQVFLKMNSLQTDDTAIY |
| | | YCAKHYYYGGSYAMDYWGQGTSVTVSSAAAIEVMYPPPYLD |
| | | NEKSNGTIIHVKGKHLCPSPLFPGPSKPFWVLVVVGGVLACYS |
| | | LLVTVAFIIFWVRSKRSRLLHSDYMNMTPRRPGPTRKHYQPYA |
| | | PPRDFAAYRSRVKFSRSADAPAYQQGQNQLYNELNLGRREEY |
| | | DVLDKRRGRDPEMGGKPRRKNPQEGLYNELQKDKMAEAYSE |
| | | IGMKGERRRGKGHDGLYQGLSTATKDTYDALHMQALPPR |
| SSJ25-C1 | 791 | QVQLLESGAELVRPGSSVKISCKASGYAFSSYWMNWVKQRPG |
| VH | | QGLEWIGQIYPGDGDTNYNGKFKGQATLTADKSSSTAYMQLS |
| sequence | | GLTSEDSAVYSCARKTISSVVDFYFDYWGQGTTVT |
| SSJ25-C1 | 792 | ELVLTQSPKFMSTSVGDRVSVTCKASQNVGTNVAWYQQKPG |
| VL | | QSPKPLIYSATYRNSGVPDRFTGSGSGTDFTLTITNVQSKDLAD |
| sequence | | YFYFCQYNRYPYTSGGGTKLEIKRRS |

[0451] In some embodiments, the antigen binding domain comprises a HC CDR1, a HC CDR2, and a HC CDR3 of any heavy chain binding domain amino acid sequences listed in Table 13A or 14A. In embodiments, the antigen binding domain further comprises a LC CDR1, a LC CDR2, and a LC CDR3. In embodiments, the antigen binding domain comprises a LC CDR1, a LC CDR2, and a LC CDR3 of any light chain binding domain amino acid sequences listed in Table 13A or 14A.

[0452] In some embodiments, the antigen binding domain comprises one, two or all of LC CDR1, LC CDR2, and LC CDR3 of any light chain binding domain amino acid sequences listed in Table 13A or 14A, and one, two or all of HC CDR1, HC CDR2, and HC CDR3 of any heavy chain binding domain amino acid sequences listed in Table 13A or 14A.

[0453] In some embodiments, the CDRs are defined according to the Kabat numbering scheme, the Chothia numbering scheme, or a combination thereof.

[0454] The sequences of humanized CDR sequences of the scFv domains are shown in Table 15A for the heavy chain variable domains and in Table 16A for the light chain variable domains. “ID” stands for the respective SEQ ID NO for each CDR.

TABLE 15A
Heavy Chain Variable Domain CDRs (Kabat)

| Candidate | FW | HCDR1 | ID | HCDR2 | ID | HCDR3 | ID |
|---|---|---|---|---|---|---|---|
| murine_CART19 | | DYGVS | 782 | VIWGSETTYYNSALKS | 783 | HYYYGGSYAMDY | 787 |
| humanized_CART19 a | VH4 | DYGVS | 782 | VIWGSETTYYSSSLKS | 784 | HYYYGGSYAMDY | 787 |
| humanized_CART19 b | VH4 | DYGVS | 782 | VIWGSETTYYQSSLKS | 785 | HYYYGGSYAMDY | 787 |
| humanized_CART19 c | VH4 | DYGVS | 782 | VIWGSETTYYNSSLKS | 786 | HYYYGGSYAMDY | 787 |

TABLE 16A
Light Chain Variable Domain CDRs (Kabat)

| Candidate | FW | LCDR1 | ID | LCDR2 | ID | LCDR3 | ID |
|---|---|---|---|---|---|---|---|
| murine_CART19 | | RASQDISKYLN | 788 | HTSRLHS | 789 | QQGNTLPYT | 790 |
| humanized_CART19 a | VK3 | RASQDISKYLN | 788 | HTSRLHS | 789 | QQGNTLPYT | 790 |
| humanized_CART19 b | VK3 | RASQDISKYLN | 788 | HTSRLHS | 789 | QQGNTLPYT | 790 |
| humanized_CART19 c | VK3 | RASQDISKYLN | 788 | HTSRLHS | 789 | QQGNTLPYT | 790 |

### CAR Construct Components

[0455] In embodiments, the CAR scFv fragments are cloned into lentiviral vectors to create a full length CAR construct in a single coding frame, and using the EF1 alpha promoter for expression (SEQ ID NO: 11).

EF1 alpha promoter
CGTGAGGCTCCGGTGCCCGTCAGTGGGCAGAGCGCACATCGCCCACAGTC
CCCGAGAAGTTGGGGGGAGGGGTCGGCAATTGAACCGGTGCCTAGAGAAG
GTGGCGCGGGGTAAACTGGGAAAGTGATGTCGTGTACTGGCTCCGCCTTT
TTCCCGAGGGTGGGGGAGAACCGTATATAAGTGCAGTAGTCGCCGTGAAC
GTTCTTTTTCGCAACGGGTTTGCCGCCAGAACACAGGTAAGTGCCGTGTG
TGGTTCCCGCGGGCCTGGCCTCTTTACGGGTTATGGCCCTTGCGTGCCTT
GAATTACTTCCACCTGGCTGCAGTACGTGATTCTTGATCCCGAGCTTCGG
GTTGGAAGTGGGTGGGAGAGTTCGAGGCCTTGCGCTTAAGGAGCCCCTTC
GCCTCGTGCTTGAGTTGAGGCCTGGCCTGGGCGCTGGGGCCGCCGCGTGC
GAATCTGGTGGCACCTTCGCGCCTGTCTCGCTGCTTTCGATAAGTCTCTA
GCCATTTAAAATTTTTGATGACCTGCTGCGACGCTTTTTTTCTGGCAAGA
TAGTCTTGTAAATGCGGGCCAAGATCTGCACACTGGTATTTCGGTTTTTG
GGGCCGCGGGCGGCGACGGGGCCCGTGCGTCCCAGCGCACATGTTCGGCG
AGGCGGGGCCTGCGAGCGCGGCCACCGAGAATCGGACGGGGGTAGTCTCA
AGCTGGCCGGCCTGCTCTGGTGCCTGGCCTCGCGCCGCCGTGTATCGCCC
CGCCCTGGGCGGCAAGGCTGGCCCGGTCGGCACCAGTTGCGTGAGCGGAA
AGATGGCCGCTTCCCGGCCCTGCTGCAGGGAGCTCAAAATGGAGGACGCG
GCGCTCGGGAGAGCGGGCGGGTGAGTCACCCACACAAAGGAAAAGGGCCT
TTCCGTCCTCAGCCGTCGCTTCATGTGACTCCACGGAGTACCGGGCGCCG
TCCAGGCACCTCGATTAGTTCTCGAGCTTTTGGAGTACGTCGTCTTTAGG
TTGGGGGGAGGGGTTTTATGCGATGGAGTTTCCCCACACTGAGTGGGTGG
AGACTGAAGTTAGGCCAGCTTGGCACTTGATGTAATTCTCCTTGGAATTT
GCCCTTTTTGAGTTTGGATCTTGGTTCATTCTCAAGCCTCAGACAGTGGT
TCAAAGTTTTTTTCTTCCATTTCAGGTGTCGTGA
Gly/Ser

(SEQ ID NO: 25)

GGGGS
Gly/Ser: This sequence may encompass 1-6
“Gly Gly Gly Gly Ser” repeating units

(SEQ ID NO: 26)

GGGGSGGGGS GGGGSGGGGS GGGGSGGGGS
Gly/Ser

(SEQ ID NO: 27)

GGGGSGGGGS GGGGSGGGGS
Gly/Ser

(SEQ ID NO: 28)

GGGGSGGGGS GGGGS
Gly/Ser

(SEQ ID NO: 29)

GGGS

[0456] PolyA: (A)₅₀₀₀ (SEQ ID NO:30)

[0457] This sequence may encompass 50-5000 adenines.

[0458] PolyA: (T)₁₀₀ (SEQ ID NO:31)

[0459] PolyA: (T)₅₀₀₀ (SEQ ID NO:32)

[0460] This sequence may encompass 50-5000 thymines.

[0461] PolyA: (A)₅₀₀₀ (SEQ ID NO:33)

[0462] This sequence may encompass 100-5000 adenines.

[0463] PolyA: (A)₄₀₀ (SEQ ID NO:34)

[0464] This sequence may encompass 100-400 adenines.

[0465] PolyA: (A)₂₀₀₀ (SEQ ID NO:35)

[0466] This sequence may encompass 50-2000 adenines.

Gly/Ser (SEQ ID NO: 709): This sequence may
encompass 1-10 “Gly Gly Gly Ser”
repeating units
GGGSGGGSGG GSGGGSGGGS GGGSGGGSGG GSGGGSGGGS
Linker (SEQ ID NO: 794)
GSTSGSGKPGSGEGSTKG

[0467] The CAR construct can include a Gly/Ser linker having one or more of the following sequences: GGGGS (SEQ ID NO:25); encompassing 1-6 “Gly Gly Gly Gly Ser” repeating units, e.g., GGGGSGGGGS GGGGSGGGGS GGGGSGGGGS (SEQ ID NO:26); GGGGSGGGGS GGGGSGGGGS (SEQ ID NO:27); GGGGSGGGGS GGGGS (SEQ ID NO:28); GGGS (SEQ ID NO:29); or encompassing 1-10 “Gly Gly Gly Ser” repeating units, e.g., GGGSGGGSGG GSGGGSGGGS GGGSGGGSGG GSGGGSGGGS (SEQ ID NO:709).

[0468] In embodiments, the CAR construct include a poly A sequence, e.g., a sequence encompassing 50-5000 or 100-5000 adenines (e.g., SEQ ID NO:30, SEQ ID NO:33, SEQ ID NO:34 or SEQ ID NO:35), or a sequence encompassing 50-5000 thymines (e.g., SEQ ID NO:31, SEQ ID NO:32). Alternatively, the CAR construct can include, for example, a linker including the sequence GSTSGSGKPGSGEGSTKG (SEQ ID NO: 704)

[0469] Additional sequences/components of a CAR construct can include one or more of the following:

Leader (amino acid sequence)
(SEQ ID NO: 1)
MALPVTALLLPLALLLHAARP
Leader (nucleic acid sequence)
(SEQ ID NO: 12)
ATGGCCCTGCCTGTGACAGCCCTGCTGCTGCCTCTGGCTCTGCTGCTGCATGCC
GCTAGACCC
Leader (codon optimized nucleic acid sequence)
(SEQ ID NO: 796)
ATGGCCCTCCCTGTCACCGCCCTGCTGCTTCCGCTGGCTCTTCTGCTCCACGCCG
CTCGGCCC
CD8 hinge (amino acid sequence)
(SEQ ID NO: 2)
TTTPAPRPPTPAPTIASQPLSLRPEACRPAAGGAVHTRGLDFACD
CD8 hinge (nucleic acid sequence)
(SEQ ID NO: 13)
ACCACGACGCCAGCGCCGCGACCACCAACACCGGCGCCCACCATCGCGTCGCA
GCCCCTGTCCCTGCGCCCAGAGGCGTGCCGGCCAGCGGCGGGGGGCGCAGTGC
ACACGAGGGGGCTGGACTTCGCCTGTGAT
CD8 transmembrane (amino acid sequence)
(SEQ ID NO: 6)
IYIWAPLAGTCGVLLLSLVITLYC
CD8 transmembrane (nucleic acid sequence)
(SEQ ID NO: 17)
ATCTACATCTGGGCGCCCTTGGCCGGGACTTGTGGGGTCCTTCTCCTGTCACTG
GTTATCACCCTTTACTGC
CD8 transmembrane (codon optimized nucleic
acid sequence)
(SEQ ID NO: 797)
ATCTACATTTGGGCCCCTCTGGCTGGTACTTGCGGGGTCCTGCTGCTTTCACTCG
TGATCACTCTTTACTGT
4-1BB Intracellular domain (amino acid sequence)
(SEQ ID NO: 7)
KRGRKKLLYIFKQPFMRPVQTTQEEDGCSCRFPEEEEGGCEL
4-1BB Intracellular domain (nucleic acid sequence)
(SEQ ID NO: 18)
AAACGGGGCAGAAAGAAACTCCTGTATATATTCAAACAACCATTTATGAGACC
AGTACAAACTACTCAAGAGGAAGATGGCTGTAGCTGCCGATTTCCAGAAGAAG
AAGAAGGAGGATGTGAACTG
4-1BB Intracellular domain (codon optimized nucleic
acid sequence)
(SEQ ID NO: 798)
AAGCGCGGTCGGAAGAAGCTGCTGTACATCTTTAAGCAACCCTTCATGAGGCCT
GTGCAGACTACTCAAGAGGAGGACGGCTGTTCATGCCGGTTCCCAGAGGAGGA
GGAAGGCGGCTGCGAACTG
CD28 Intracellular domain (amino acid sequence) (SEQ ID NO: 43)
(SEQ ID NO: 43)
RSKRSRLLHSDYMNMTPRRPGPTRKHYQPYAPPRDFAAYRS
CD28 Intracellular domain (nucleotide sequence)
(SEQ ID NO: 44)
AGGAGTAAGAGGAGCAGGCTCCTGCACAGTGACTACATGAACATGACTCCCCG
CCGCCCCGGGCCCACCCGCAAGCATTACCAGCCCTATGCCCCACCACGCGACTT
CGCAGCCTATCGCTCC (SEQ ID NO: 44)
ICOS Intracellular domain (amino acid sequence)
(SEQ ID NO: 45)
T K K K Y S S S V H D P N G E Y M F M R A V N T A K K
S R L T D V T L
ICOS Intracellular domain (nucleotide sequence) (SEQ ID NO: 46)
(SEQ ID NO: 46)
ACAAAAAAGAAGTATTCATCCAGTGTGCACGACCCTAACGGTGAATACATGTT
CATGAGAGCAGTGAACACAGCCAAAAAATCCAGACTCACAGATGTGACCCTA
(SEQ ID NO: 45)
CD3 zeta domain (Q/K mutant) (amino acid sequence)
(SEQ ID NO: 9)
RVKFSRSADAPAYKQGQNQLYNELNLGRREEYDVLDKRRGRDPEMGGKPRRKNP
QEGLYNELQKDKMAEAYSEIGMKGERRRGKGHDGLYQGLSTATKDTYDALHMQ
ALPPR
CD3 zeta (Q/K mutant) (nucleic acid sequence)
(SEQ ID NO: 20)
AGAGTGAAGTTCAGCAGGAGCGCAGACGCCCCCGCGTACAAGCAGGGCCAGA
ACCAGCTCTATAACGAGCTCAATCTAGGACGAAGAGAGGAGTACGATGTTTTG
GACAAGAGACGTGGCCGGGACCCTGAGATGGGGGGAAAGCCGAGAAGGAAGA
ACCCTCAGGAAGGCCTGTACAATGAACTGCAGAAAGATAAGATGGCGGAGGCC
TACAGTGAGATTGGGATGAAAGGCGAGCGCCGGAGGGGCAAGGGGCACGATG
GCCTTTACCAGGGTCTCAGTACAGCCACCAAGGACACCTACGACGCCCTTCACA
TGCAGGCCCTGCCCCCTCGC
CD3 zeta (Q/K mutant) (codon optimized nucleic
acid sequence)
(SEQ ID NO: 799)
CGCGTGAAATTCAGCCGCAGCGCAGATGCTCCAGCCTACAAGCAGGGGCAGAA
CCAGCTCTACAACGAACTCAATCTTGGTCGGAGAGAGGAGTACGACGTGCTGG
ACAAGCGGAGAGGACGGGACCCAGAAATGGGCGGGAAGCCGCGCAGAAAGAA
TCCCCAAGAGGGCCTGTACAACGAGCTCCAAAAGGATAAGATGGCAGAAGCCT
ATAGCGAGATTGGTATGAAAGGGGAACGCAGAAGAGGCAAAGGCCACGACGG
ACTGTACCAGGGACTCAGCACCGCCACCAAGGACACCTATGACGCTCTTCACAT
GCAGGCCCTGCCGCCTCGG
CD3 zeta domain (amino acid sequence; NCBI Reference
Sequence NM_000734.3)
(SEQ ID NO: 10)
RVKFSRSADAPAYQQGQNQLYNELNLGRREEYDVLDKRRGRDPEMGGKPRRKNP
QEGLYNELQKDKMAEAYSEIGMKGERRRGKGHDGLYQGLSTATKDTYDALHMQ
ALPPR
CD3 zeta (nucleic acid sequence; NCBI Reference Sequence
NM_000734.3);
(SEQ ID NO: 21)
AGAGTGAAGTTCAGCAGGAGCGCAGACGCCCCCGCGTACCAGCAGGGCCAG
AACCAGCTCTATAACGAGCTCAATCTAGGACGAAGAGAGGAGTACGATGTTT
TGGACAAGAGACGTGGCCGGGACCCTGAGATGGGGGGAAAGCCGAGAAGGA
AGAACCCTCAGGAAGGCCTGTACAATGAACTGCAGAAAGATAAGATGGCGG
AGGCCTACAGTGAGATTGGGATGAAAGGCGAGCGCCGGAGGGGCAAGGGGC
ACGATGGCCTTTACCAGGGTCTCAGTACAGCCACCAAGGACACCTACGACGC
CCTTCACATGCAGGCCCTGCCCCCTCGC
IgG4 Hinge (amino acid sequence)
(SEQ ID NO: 3)
ESKYGPPCPPCPAPEFLGGPSVFLFPPKPKDTLMISRTPEVTCVVVDVSQEDPEVQFN
WYVDGVEVHNAKTKPREEQFNSTYRVVSVLTVLHQDWLNGKEYKCKVSNKGLPS
SIEKTISKAKGQPREPQVYTLPPSQEEMTKNQVSLTCLVKGFYPSDIAVEWESNGQP
ENNYKTTPPVLDSDGSFFLYSRLTVDKSRWQEGNVFSCSVMHEALHNHYTQKSLS
LSLGKM
IgG4 Hinge (nucleotide sequence)
(SEQ ID NO: 14)
GAGAGCAAGTACGGCCCTCCCTGCCCCCCTTGCCCTGCCCCCGAGTTCCTGGGC
GGACCCAGCGTGTTCCTGTTCCCCCCCAAGCCCAAGGACACCCTGATGATCAGC
CGGACCCCCGAGGTGACCTGTGTGGTGGTGGACGTGTCCCAGGAGGACCCCGA
GGTCCAGTTCAACTGGTACGTGGACGGCGTGGAGGTGCACAACGCCAAGACCA
AGCCCCGGGAGGAGCAGTTCAATAGCACCTACCGGGTGGTGTCCGTGCTGACC
GTGCTGCACCAGGACTGGCTGAACGGCAAGGAATACAAGTGTAAGGTGTCCAA
CAAGGGCCTGCCCAGCAGCATCGAGAAAACCATCAGCAAGGCCAAGGGCCAG
CCTCGGGAGCCCCAGGTGTACACCCTGCCCCCTAGCCAAGAGGAGATGACCAA
GAACCAGGTGTCCCTGACCTGCCTGGTGAAGGGCTTCTACCCCAGCGACATCGC
CGTGGAGTGGGAGAGCAACGGCCAGCCCGAGAACAACTACAAGACCACCCCCC
CTGTGCTGGACAGCGACGGCAGCTTCTTCCTGTACAGCCGGCTGACCGTGGACA
AGAGCCGGTGGCAGGAGGGCAACGTCTTTAGCTGCTCCGTGATGCACGAGGCC
CTGCACAACCACTACACCCAGAAGAGCCTGAGCCTGTCCCTGGGCAAGATG
IgD hinge (aa)
(SEQ ID NO: 4)
RWPESPKAQASSVPTAQPQAEGSLAKATTAPATTRNTGRGGEEKKKEKEKEEQEERET
KTPECPSHTQPLGVYLLTPAVQDLWLRDKATFTCFVVGSDLKDAHLTWEVAGKVPTG
GVEEGLLERHSNGSQSQHSRLTLPRSLWNAGTSVTCTLNHPSLPPQRLMALREPAAQA
PVKLSLNLLASSDPPEAASWLLCEVSGFSPPNILLMWLEDQREVNTSGFAPARPPPQPG
STTFWAWSVLRVPAPPSPQPATYTCVVSHEDSRTLLNASRSLEVSYVTDH
IgD hinge (na)
(SEQ ID NO: 15)
AGGTGGCCCGAAAGTCCCAAGGCCCAGGCATCTAGTGTTCCTACTGCACAGCCCCA
GGCAGAAGGCAGCCTAGCCAAAGCTACTACTGCACCTGCCACTACGCGCAATACT
GGCCGTGGCGGGGAGGAGAAGAAAAAGGAGAAAGAGAAAGAAGAACAGGAAGA
GAGGGAGACCAAGACCCCTGAATGTCCATCCCATACCCAGCCGCTGGGCGTCTATC
TCTTGACTCCCGCAGTACAGGACTTGTGGCTTAGAGATAAGGCCACCTTTACATGT
TTCGTCGTGGGCTCTGACCTGAAGGATGCCCATTTGACTTGGGAGGTTGCCGGAAA
GGTACCCACAGGGGGGGTTGAGGAAGGGTTGCTGGAGCGCCATTCCAATGGCTCT
CAGAGCCAGCACTCAAGACTCACCCTTCCGAGATCCCTGTGGAACGCCGGGACCTC
TGTCACATGTACTCTAAATCATCCTAGCCTGCCCCCACAGCGTCTGATGGCCCTTAG
AGAGCCAGCCGCCCAGGCACCAGTTAAGCTTAGCCTGAATCTGCTCGCCAGTAGTG
ATCCCCCAGAGGCCGCCAGCTGGCTCTTATGCGAAGTGTCCGGCTTTAGCCCGCCC
AACATCTTGCTCATGTGGCTGGAGGACCAGCGAGAAGTGAACACCAGCGGCTTCG
CTCCAGCCCGGCCCCCACCCCAGCCGGGTTCTACCACATTCTGGGCCTGGAGTGTC
TTAAGGGTCCCAGCACCACCTAGCCCCCAGCCAGCCACATACACCTGTGTTGTGTC
CCATGAAGATAGCAGGACCCTGCTAAATGCTTCTAGGAGTCTGGAGGTTTCCTACG
TGACTGACCATT
CD27 (aa)
(SEQ ID NO: 8)
QRRKYRSNKGESPVEPAEPCRYSCPREEEGSTIPIQEDYRKPEPACSP
CD27 (na)
(SEQ ID NO: 19)
AGGAGTAAGAGGAGCAGGCTCCTGCACAGTGACTACATGAACATGACTCCCCGCC
GCCCCGGGCCCACCCGCAAGCATTACCAGCCCTATGCCCCACCACGCGACTTCGCA
GCCTATCGCTCC
Y to F mutant ICOS domain (aa)
(SEQ ID NO: 795)
TKKKYSSSVHDPNGEFMFMRAVNTAKKSRLTDVTL

### Bispecific CARs

[0470] In an embodiment a multispecific antibody molecule is a bispecific antibody molecule. A bispecific antibody has specificity for no more than two antigens. A bispecific antibody molecule is characterized by a first immunoglobulin variable domain sequence which has binding specificity for a first epitope and a second immunoglobulin variable domain sequence that has binding specificity for a second epitope. In an embodiment the first and second epitopes are on the same antigen, e.g., the same protein (or subunit of a multimeric protein). In an embodiment the first and second epitopes overlap. In an embodiment the first and second epitopes do not overlap. In an embodiment the first and second epitopes are on different antigens, e.g., different proteins (or different subunits of a multimeric protein). In an embodiment a bispecific antibody molecule comprises a heavy chain variable domain sequence and a light chain variable domain sequence which have binding specificity for a first epitope and a heavy chain variable domain sequence and a light chain variable domain sequence which have binding specificity for a second epitope. In an embodiment a bispecific antibody molecule comprises a half antibody having binding specificity for a first epitope and a half antibody having binding specificity for a second epitope. In an embodiment a bispecific antibody molecule comprises a half antibody, or fragment thereof, having binding specificity for a first epitope and a half antibody, or fragment thereof, having binding specificity for a second epitope. In an embodiment a bispecific antibody molecule comprises a scFv, or fragment thereof, have binding specificity for a first epitope and a scFv, or fragment thereof, have binding specificity for a second epitope.

[0471] In certain embodiments, the antibody molecule is a multi-specific (e.g., a bispecific or a trispecific) antibody molecule. Protocols for generating bispecific or heterodimeric antibody molecules are known in the art; including but not limited to, for example, the “knob in a hole” approach described in, e.g., U.S. Pat. No. 5,731,168; the electrostatic steering Fc pairing as described in, e.g., WO 09/089004, WO 06/106905 and WO 2010/129304; Strand Exchange Engineered Domains (SEED) heterodimer formation as described in, e.g., WO 07/110205; Fab arm exchange as described in, e.g., WO 08/119353, WO 2011/131746, and WO 2013/060867; double antibody conjugate, e.g., by antibody cross-linking to generate a bi-specific structure using a heterobifunctional reagent having an amine-reactive group and a sulfhydryl reactive group as described in, e.g., U.S. Pat. No. 4,433,059; bispecific antibody determinants generated by recombining half antibodies (heavy-light chain pairs or Fabs) from different antibodies through cycle of reduction and oxidation of disulfide bonds between the two heavy chains, as described in, e.g., U.S. Pat. No. 4,444,878; trifunctional antibodies, e.g., three Fab′ fragments cross-linked through sulfhdryl reactive groups, as described in, e.g., U.S. Pat. No. 5,273,743; biosynthetic binding proteins, e.g., pair of scFvs cross-linked through C-terminal tails preferably through disulfide or amine-reactive chemical cross-linking, as described in, e.g., U.S. Pat. No. 5,534,254; bifunctional antibodies, e.g., Fab fragments with different binding specificities dimerized through leucine zippers (e.g., c-fos and c-jun) that have replaced the constant domain, as described in, e.g., U.S. Pat. No. 5,582,996; bispecific and oligospecific mono- and oligovalent receptors, e.g., VH-CH1 regions of two antibodies (two Fab fragments) linked through a polypeptide spacer between the CH1 region of one antibody and the VH region of the other antibody typically with associated light chains, as described in, e.g., U.S. Pat. No. 5,591,828; bispecific DNA-antibody conjugates, e.g., crosslinking of antibodies or Fab fragments through a double stranded piece of DNA, as described in, e.g., U.S. Pat. No. 5,635,602; bispecific fusion proteins, e.g., an expression construct containing two scFvs with a hydrophilic helical peptide linker between them and a full constant region, as described in, e.g., U.S. Pat. No. 5,637,481; multivalent and multispecific binding proteins, e.g., dimer of polypeptides having first domain with binding region of Ig heavy chain variable region, and second domain with binding region of Ig light chain variable region, generally termed diabodies (higher order structures are also encompassed creating for bispecifc, trispecific, or tetraspecific molecules, as described in, e.g., U.S. Pat. No. 5,837,242; minibody constructs with linked VL and VH chains further connected with peptide spacers to an antibody hinge region and CH3 region, which can be dimerized to form bispecific/multivalent molecules, as described in, e.g., U.S. Pat. No. 5,837,821; VH and VL domains linked with a short peptide linker (e.g., 5 or 10 amino acids) or no linker at all in either orientation, which can form dimers to form bispecific diabodies; trimers and tetramers, as described in, e.g., U.S. Pat. No. 5,844,094; String of VH domains (or VL domains in family members) connected by peptide linkages with crosslinkable groups at the C-terminus futher associated with VL domains to form a series of FVs (or scFvs), as described in, e.g., U.S. Pat. No. 5,864,019; and single chain binding polypeptides with both a VH and a VL domain linked through a peptide linker are combined into multivalent structures through non-covalent or chemical crosslinking to form, e.g., homobivalent, heterobivalent, trivalent, and tetravalent structures using both scFV or diabody type format, as described in, e.g., U.S. Pat. No. 5,869,620. Additional exemplary multispecific and bispecific molecules and methods of making the same are found, for example, in U.S. Pat. Nos. 5,910,573, 5,932,448, 5,959,083, 5,989,830, 6,005,079, 6,239,259, 6,294,353, 6,333,396, 6,476,198, 6,511,663, 6,670,453, 6,743,896, 6,809,185, 6,833,441, 7,129,330, 7,183,076, 7,521,056, 7,527,787, 7,534,866, 7,612,181, US2002004587A1, US2002076406A1, US2002103345A1, US2003207346A1, US2003211078A1, US2004219643A1, US2004220388A1, US2004242847A1, US2005003403A1, US2005004352A1, US2005069552A1, US2005079170A1, US2005100543A1, US2005136049A1, US2005136051A1, US2005163782A1, US2005266425A1, US2006083747A1, US2006120960A1, US2006204493A1, US2006263367A1, US2007004909A1, US2007087381A1, US2007128150A1, US2007141049A1, US2007154901A1, US2007274985A1, US2008050370A1, US2008069820A1, US2008152645A1, US2008171855A1, US2008241884A1, US2008254512A1, US2008260738A1, US2009130106A1, US2009148905A1, US2009155275A1, US2009162359A1, US2009162360A1, US2009175851A1, US2009175867A1, US2009232811A1, US2009234105A1, US2009263392A1, US2009274649A1, EP346087A2, WO0006605A2, WO02072635A2, WO04081051A1, WO06020258A2, WO2007044887A2, WO2007095338A2, WO2007137760A2, WO2008119353A1, WO2009021754A2, WO2009068630A1, WO9103493A1, WO9323537A1, WO9409131A1, WO9412625A2, WO9509917A1, WO9637621A2, WO9964460A1. The contents of the above-referenced applications are incorporated herein by reference in their entireties.

[0472] Within each antibody or antibody fragment (e.g., scFv) of a bispecific antibody molecule, the VH can be upstream or downstream of the VL. In some embodiments, the upstream antibody or antibody fragment (e.g., scFv) is arranged with its VH (VH₁) upstream of its VL (VL₁) and the downstream antibody or antibody fragment (e.g., scFv) is arranged with its VL (VL₂) upstream of its VH (VH₂), such that the overall bispecific antibody molecule has the arrangement VH₁-VL₁-VL₂-VH₂. In other embodiments, the upstream antibody or antibody fragment (e.g., scFv) is arranged with its VL (VL₁) upstream of its VH (VH₁) and the downstream antibody or antibody fragment (e.g., scFv) is arranged with its VH (VH₂) upstream of its VL (VL₂), such that the overall bispecific antibody molecule has the arrangement VL₁-VH₁-VH₂-VL₂. Optionally, a linker is disposed between the two antibodies or antibody fragments (e.g., scFvs), e.g., between VL₁ and VL₂ if the construct is arranged as VH₁-VL₁-VL₂-VH₂, or between VH₁ and VH₂ if the construct is arranged as VL₁-VH₁-VH₂-VL₂. The linker may be a linker as described herein, e.g., a (Gly₄-Ser)n linker, wherein n is 1, 2, 3, 4, 5, or 6, preferably 4 (SEQ ID NO: 26). In general, the linker between the two scFvs should be long enough to avoid mispairing between the domains of the two scFvs. Optionally, a linker is disposed between the VL and VH of the first scFv. Optionally, a linker is disposed between the VL and VH of the second scFv. In constructs that have multiple linkers, any two or more of the linkers can be the same or different. Accordingly, in some embodiments, a bispecific CAR comprises VLs, VHs, and optionally one or more linkers in an arrangement as described herein.

[0473] In one aspect, the bispecific antibody molecule is characterized by a first immunoglobulin variable domain sequence, e.g., a scFv, which has binding specificity for an antigen (e.g., tumor antigen, e.g., B cell antigen, e.g., CD123 or CD19), e.g., comprises a scFv as described herein, e.g., as described in Table 11A, Table 12A, Table 12B, Table 13A, or Table 14A, or comprises the light chain CDRs and/or heavy chain CDRs from a scFv (e.g., CD123 or CD19 scFv) described herein, and a second immunoglobulin variable domain sequence that has binding specificity for a second epitope on a different antigen. In some aspects the second immunoglobulin variable domain sequence has binding specificity for an antigen expressed on AML cells, e.g., an antigen other than CD123. For example, the second immunoglobulin variable domain sequence has binding specificity for CLL-1. As another example, the second immunoglobulin variable domain sequence has binding specificity for CD33. As another example, the second immunoglobulin variable domain sequence has binding specificity for CD34. As another example, the second immunoglobulin variable domain sequence has binding specificity for FLT3. For example, the second immunoglobulin variable domain sequence has binding specificity for folate receptor beta. In some aspects, the second immunoglobulin variable domain sequence has binding specificity for an antigen expressed on B-cells, for example, CD19, CD20, CD22 or ROR1.

### Chimeric TCR

[0474] In one aspect, the antibodies and antibody fragments (e.g., anti-CD123 antibodies or antibody fragments) of the present invention (for example, those disclosed in Tables 11A, 12A, 12B, 13A, or 14A) can be grafted to one or more constant domain of a T cell receptor (“TCR”) chain, for example, a TCR alpha or TCR beta chain, to create an chimeric TCR that binds specificity to the antigen (e.g., tumor antigen, e.g., B cell antigen, e.g, CD123 or CD19). Without being bound by theory, it is believed that chimeric TCRs will signal through the TCR complex upon antigen binding. For example, a scFv (e.g., CD123 scFv or CD19 scFv) as disclosed herein, can be grafted to the constant domain, e.g., at least a portion of the extracellular constant domain, the transmembrane domain and the cytoplasmic domain, of a TCR chain, for example, the TCR alpha chain and/or the TCR beta chain. As another example, an antibody fragment (e.g., anti-CD123 antibody fragment or anti-CD19 antibody fragment), for example a VL domain as described herein, can be grafted to the constant domain of a TCR alpha chain, and an antibody fragment (e.g., anti-CD123 antibody fragment or anti-CD19 antibody fragment), for example a VH domain as described herein, can be grafted to the constant domain of a TCR beta chain (or alternatively, a VL domain may be grafted to the constant domain of the TCR beta chain and a VH domain may be grafted to a TCR alpha chain). As another example, the CDRs of an antibody or antibody fragment (e.g., CD123 antibody or antibody fragment, e.g., the CDRs of a CD123 antibody or antibody fragment as described in Tables 1A, 2A, 3A, 4A, 5A, 6A, 7A, 8A, 10A, or 12A; or the CDRs of a CD19 antibody or antibody fragment, e.g., described in Tables 13A, 14A, 15A, or 16A) may be grafted into a TCR alpha and/or beta chain to create a chimeric TCR that binds specifically to the antigen (e.g., CD123 or CD19). For example, the LCDRs disclosed herein may be grafted into the variable domain of a TCR alpha chain and the HCDRs disclosed herein may be grafted to the variable domain of a TCR beta chain, or vice versa. Such chimeric TCRs may be produced by methods known in the art (for example, Willemsen R A et al, Gene Therapy 2000; 7: 1369-1377; Zhang T et al, Cancer Gene Ther 2004; 11: 487-496; Aggen et al, Gene Ther. 2012 April; 19(4):365-74).

### Stability and Mutations

[0475] The stability of an antigen binding domain (e.g., tumor antigen binding domain, e.g., B cell antigen binding domain, e.g., CD123 binding domain or CD19 binding domain), e.g., scFv molecules (e.g., soluble scFv) can be evaluated in reference to the biophysical properties (e.g., thermal stability, percent aggregation, and binding affinity) of, e.g., a conventional control scFv molecule or a full length antibody as described on pages 147-151 of WO 2016/028896 filed on Aug. 19, 2015, the entire contents of which are hereby incorporated by reference.

[0476] In one aspect, the antigen binding domain of the CAR comprises an amino acid sequence that is homologous to an antigen binding domain amino acid sequence described herein, and the antigen binding domain retains the desired functional properties of the CD123 antibody fragments described herein. In one specific aspect, the CAR composition of the invention comprises an antibody fragment. In a further aspect, that antibody fragment comprises an scFv.

[0477] In various aspects, the antigen binding domain of the CAR is engineered by modifying one or more amino acids within one or both variable regions (e.g., VH and/or VL), for example within one or more CDR regions and/or within one or more framework regions. In one specific aspect, the CAR composition of the invention comprises an antibody fragment. In a further aspect, that antibody fragment comprises an scFv.

[0478] It will be understood by one of ordinary skill in the art that the antibody or antibody fragment of the invention may further be modified such that they vary in amino acid sequence (e.g., from wild-type), but not in desired activity. For example, additional nucleotide substitutions leading to amino acid substitutions at “non-essential” amino acid residues may be made to the protein For example, a nonessential amino acid residue in a molecule may be replaced with another amino acid residue from the same side chain family. In another embodiment, a string of amino acids can be replaced with a structurally similar string that differs in order and/or composition of side chain family members, e.g., a conservative substitution, in which an amino acid residue is replaced with an amino acid residue having a similar side chain, may be made.

[0479] Families of amino acid residues having similar side chains have been defined in the art, including basic side chains (e.g., lysine, arginine, histidine), acidic side chains (e.g., aspartic acid, glutamic acid), uncharged polar side chains (e.g., glycine, asparagine, glutamine, serine, threonine, tyrosine, cysteine), nonpolar side chains (e.g., alanine, valine, leucine, isoleucine, proline, phenylalanine, methionine, tryptophan), beta-branched side chains (e.g., threonine, valine, isoleucine) and aromatic side chains (e.g., tyrosine, phenylalanine, tryptophan, histidine).

[0480] Percent identity in the context of two or more nucleic acids or polypeptide sequences, refers to two or more sequences that are the same. Two sequences are “substantially identical” if two sequences have a specified percentage of amino acid residues or nucleotides that are the same (e.g., 60% identity, optionally 70%, 71%. 72%. 73%, 74%, 75%, 76%, 77%, 78%, 79%, 80%, 81%, 82%, 83%, 84%, 85%, 86%, 87%, 88%, 89%, 90%, 91%, 92%, 93%, 94%, 95%, 96%, 97%, 98%, 99% identity over a specified region, or, when not specified, over the entire sequence), when compared and aligned for maximum correspondence over a comparison window, or designated region as measured using one of the following sequence comparison algorithms or by manual alignment and visual inspection. Optionally, the identity exists over a region that is at least about 50 nucleotides (or 10 amino acids) in length, or more preferably over a region that is 100 to 500 or 1000 or more nucleotides (or 20, 50, 200 or more amino acids) in length.

[0481] For sequence comparison, typically one sequence acts as a reference sequence, to which test sequences are compared. When using a sequence comparison algorithm, test and reference sequences are entered into a computer, subsequence coordinates are designated, if necessary, and sequence algorithm program parameters are designated. Default program parameters can be used, or alternative parameters can be designated. The sequence comparison algorithm then calculates the percent sequence identities for the test sequences relative to the reference sequence, based on the program parameters. Methods of alignment of sequences for comparison are well known in the art. Optimal alignment of sequences for comparison can be conducted, e.g., by the local homology algorithm of Smith and Waterman, (1970) Adv. Appl. Math. 2:482c, by the homology alignment algorithm of Needleman and Wunsch, (1970) J. Mol. Biol. 48:443, by the search for similarity method of Pearson and Lipman, (1988) Proc. Nat'l. Acad. Sci. USA 85:2444, by computerized implementations of these algorithms (GAP, BESTFIT, FASTA, and TFASTA in the Wisconsin Genetics Software Package, Genetics Computer Group, 575 Science Dr., Madison, Wis.), or by manual alignment and visual inspection (see, e.g., Brent et al., (2003) Current Protocols in Molecular Biology).

[0482] Two examples of algorithms that are suitable for determining percent sequence identity and sequence similarity are the BLAST and BLAST 2.0 algorithms, which are described in Altschul et al., (1977) Nuc. Acids Res. 25:3389-3402; and Altschul et al., (1990) J. Mol. Biol. 215:403-410, respectively. Software for performing BLAST analyses is publicly available through the National Center for Biotechnology Information.

[0483] The percent identity between two amino acid sequences can also be determined using the algorithm of E. Meyers and W. Miller, (1988) Comput. Appl. Biosci. 4:11-17) which has been incorporated into the ALIGN program (version 2.0), using a PAM120 weight residue table, a gap length penalty of 12 and a gap penalty of 4. In addition, the percent identity between two amino acid sequences can be determined using the Needleman and Wunsch (1970) J. Mol. Biol. 48:444-453) algorithm which has been incorporated into the GAP program in the GCG software package (available at www.gcg.com), using either a Blossom 62 matrix or a PAM250 matrix, and a gap weight of 16, 14, 12, 10, 8, 6, or 4 and a length weight of 1, 2, 3, 4, 5, or 6.

[0484] In one aspect, the present invention contemplates modifications of the starting antibody or fragment (e.g., scFv) amino acid sequence that generate functionally equivalent molecules. For example, the VH or VL of an antigen binding domain (e.g., tumor antigen binding domain, e.g., B cell antigen binding domain, e.g., CD123 binding domain or CD19 binding domain), e.g., scFv, comprised in the CAR can be modified to retain at least about 70%, 71%. 72%. 73%, 74%, 75%, 76%, 77%, 78%, 79%, 80%, 81%, 82%, 83%, 84%, 85%, 86%, 87%, 88%, 89%, 90%, 91%, 92%, 93%, 94%, 95%, 96%, 97%, 98%, 99% identity of the starting VH or VL framework region of the antigen binding domain (e.g., tumor antigen binding domain, e.g., B cell antigen binding domain, e.g., CD123 binding domain or CD19 binding domain), e.g., scFv. The present invention contemplates modifications of the entire CAR construct, e.g., modifications in one or more amino acid sequences of the various domains of the CAR construct in order to generate functionally equivalent molecules. The CAR construct can be modified to retain at least about 70%, 71%. 72%. 73%, 74%, 75%, 76%, 77%, 78%, 79%, 80%, 81%, 82%, 83%, 84%, 85%, 86%, 87%, 88%, 89%, 90%, 91%, 92%, 93%, 94%, 95%, 96%, 97%, 98%, 99% identity of the starting CAR construct.

### Antigens

[0485] In accordance with any method or composition described herein, exemplary tumor antigens include but are not limited to one or more of the following: thyroid stimulating hormone receptor (TSHR); CD171; CS-1 (CD2 subset 1, CRACC, SLAMF7, CD319, and 19A24); C-type lectin-like molecule-1 (CLL-1); ganglioside GD3 (aNeu5Ac(2-8)aNeu5Ac(2-3)bDGalp(1-4)bDGlcp(1-1)Cer); Tn antigen (Tn Ag); Fms-Like Tyrosine Kinase 3 (FLT3); CD38; CD44v6; B7H3 (CD276); KIT (CD117); Interleukin-13 receptor subunit alpha-2 (IL-13Ra2); Interleukin 11 receptor alpha (IL-11Ra); prostate stem cell antigen (PSCA); Protease Serine 21 (PRSS21); vascular endothelial growth factor receptor 2 (VEGFR2); Lewis(Y) antigen; CD24; Platelet-derived growth factor receptor beta (PDGFR-beta); stage-specific embryonic antigen-4 (SSEA-4); Mucin 1, cell surface associated (MUC1); epidermal growth factor receptor (EGFR); neural cell adhesion molecule (NCAM); carbonic anhydrase IX (CAIX); Proteasome (Prosome, Macropain) Subunit, Beta Type, 9 (LMP2); ephrin type-A receptor 2 (EphA2); Fucosyl GM1; sialyl Lewis adhesion molecule (sLe); ganglioside GM3 (aNeu5Ac(2-3)bDGalp(1-4)bDGlcp(1-1)Cer; TGS5; high molecular weight-melanoma-associated antigen (HMWMAA); o-acetyl-GD2 ganglioside (OAcGD2); Folate receptor beta; tumor endothelial marker 1 (TEM1/CD248); tumor endothelial marker 7-related (TEM7R); claudin 6 (CLDN6); G protein-coupled receptor class C group 5, member D (GPRCSD); chromosome X open reading frame 61 (CXORF61); CD97; CD179a; anaplastic lymphoma kinase (ALK); Polysialic acid; placenta-specific 1 (PLAC1); hexasaccharide portion of globoH glycoceramide (GloboH); mammary gland differentiation antigen (NY-BR-1); uroplakin 2 (UPK2); Hepatitis A virus cellular receptor 1 (HAVCR1); adrenoceptor beta 3 (ADRB3); pannexin 3 (PANX3); G protein-coupled receptor 20 (GPR20); lymphocyte antigen 6 complex, locus K 9 (LY6K); Olfactory receptor 51E2 (OR51E2); TCR Gamma Alternate Reading Frame Protein (TARP); Wilms tumor protein (WT1); ETS translocation-variant gene 6, located on chromosome 12p (ETV6-AML); sperm protein 17 (SPA17); X Antigen Family, Member 1A (XAGE1); angiopoietin-binding cell surface receptor 2 (Tie 2); melanoma cancer testis antigen-1 (MAD-CT-1); melanoma cancer testis antigen-2 (MAD-CT-2); Fos-related antigen 1; p53 mutant; human Telomerase reverse transcriptase (hTERT); sarcoma translocation breakpoints; melanoma inhibitor of apoptosis (ML-IAP); ERG (transmembrane protease, serine 2 (TMPRSS2) ETS fusion gene); N-Acetyl glucosaminyl-transferase V (NA17); paired box protein Pax-3 (PAX3); Androgen receptor; Cyclin B1; v-myc avian myelocytomatosis viral oncogene neuroblastoma derived homolog (MYCN); Ras Homolog Family Member C (RhoC); Cytochrome P450 1B1 (CYP1B1); CCCTC-Binding Factor (Zinc Finger Protein)-Like (BORIS); Squamous Cell Carcinoma Antigen Recognized By T Cells 3 (SART3); Paired box protein Pax-5 (PAX5); proacrosin binding protein sp32 (OY-TES1); lymphocyte-specific protein tyrosine kinase (LCK); A kinase anchor protein 4 (AKAP-4); synovial sarcoma, X breakpoint 2 (SSX2); CD79a; CD79b; CD72; Leukocyte-associated immunoglobulin-like receptor 1 (LAIR1); Fc fragment of IgA receptor (FCAR); Leukocyte immunoglobulin-like receptor subfamily A member 2 (LILRA2); CD300 molecule-like family member f (CD300LF); C-type lectin domain family 12 member A (CLEC12A); bone marrow stromal cell antigen 2 (BST2); EGF-like module-containing mucin-like hormone receptor-like 2 (EMR2); lymphocyte antigen 75 (LY75); Glypican-3 (GPC3); Fc receptor-like 5 (FCRL5); and immunoglobulin lambda-like polypeptide 1 (IGLL1).

[0486] In embodiments, the tumor antigen is selected from a group consisting of: TSHR, CD19, CD123, CD22, CD30, CD171, CS-1, CLL-1, CD33, EGFRvIII, GD2, GD3, BCMA, Tn Ag, PSMA, ROR1, FLT3, FAP, TAG72, CD38, CD44v6, CEA, EPCAM, B7H3, KIT, IL-13Ra2, Mesothelin, IL-11Ra, PSCA, PRSS21, VEGFR2, LewisY, CD24, PDGFR-beta, SSEA-4, CD20, Folate receptor alpha, ERBB2 (Her2/neu), MUC1, EGFR, NCAM, Prostase, PAP, ELF2M, Ephrin B2, IGF-I receptor, CAIX, LMP2, gp100, bcr-abl, tyrosinase, EphA2, Fucosyl GM1, sLe, GM3, TGS5, HMWMAA, o-acetyl-GD2, Folate receptor beta, TEM1/CD248, TEM7R, CLDN6, GPRC5D, CXORF61, CD97, CD179a, ALK, Polysialic acid, PLAC1, GloboH, NY-BR-1, UPK2, HAVCR1, ADRB3, PANX3, GPR20, LY6K, OR51E2, TARP, WT1, NY-ESO-1, LAGE-1a, MAGE-A1, legumain, HPV E6,E7, MAGE A1, ETV6-AML, sperm protein 17, XAGE1, Tie 2, MAD-CT-1, MAD-CT-2, Fos-related antigen 1, p53, p53 mutant, prostein, survivin and telomerase, PCTA-1/Galectin 8, MelanA/MART1, Ras mutant, hTERT, sarcoma translocation breakpoints, ML-IAP, ERG (TMPRSS2 ETS fusion gene), NA17, PAX3, Androgen receptor, Cyclin B1, MYCN, RhoC, TRP-2, CYP1B1, BORIS, SART3, PAX5, OY-TES1, LCK, AKAP-4, SSX2, RAGE-1, human telomerase reverse transcriptase, RU1, RU2, intestinal carboxyl esterase, mut hsp70-2, CD79a, CD79b, CD72, LAIR1, FCAR, LILRA2, CD300LF, CLEC12A, BST2, EMR2, LY75, GPC3, FCRL5, and IGLL1.

[0487] In embodiments, the tumor antigen is a B cell antigen (e.g., B cell surface antigen), e.g., CD10, CD19, CD20, CD22, CD34, CD123, FLT-3, ROR1, CD79b, CD179b, or CD79a.

[0488] In embodiments, the tumor antigen is CD123. In embodiments, the tumor antigen is CD19. In other embodiments, the tumor antigen is BCMA, CLL-1, or EGFRvIII.

### Transmembrane Domain

[0489] With respect to the transmembrane domain, in various embodiments, a CAR can be designed to comprise a transmembrane domain that is attached to the extracellular domain of the CAR. A transmembrane domain can include one or more additional amino acids adjacent to the transmembrane region, e.g., one or more amino acid associated with the extracellular region of the protein from which the transmembrane was derived (e.g., 1, 2, 3, 4, 5, 6, 7, 8, 9, 10 up to 15 amino acids of the extracellular region) and/or one or more additional amino acids associated with the intracellular region of the protein from which the transmembrane protein is derived (e.g., 1, 2, 3, 4, 5, 6, 7, 8, 9, 10 up to 15 amino acids of the intracellular region). In one aspect, the transmembrane domain is one that is associated with one of the otherdomains of the CAR is used. In some instances, the transmembrane domain can be selected or modified by amino acid substitution to avoid binding of such domains to the transmembrane domains of the same or different surface membrane proteins, e.g., to minimize interactions with other members of the receptor complex. In one aspect, the transmembrane domain is capable of homodimerization with another CAR on the CAR-expressing cell, e.g., CART cell, cell surface. In a different aspect the amino acid sequence of the transmembrane domain may be modified or substituted so as to minimize interactions with the binding domains of the native binding partner present in the same CAR-expressing cell, e.g., CART cell.

[0490] The transmembrane domain may be derived either from a natural or from a recombinant source. Where the source is natural, the domain may be derived from any membrane-bound or transmembrane protein. In one aspect the transmembrane domain is capable of signaling to the intracellular domain(s) whenever the CAR has bound to a target. A transmembrane domain of particular use in this invention may include at least the transmembrane region(s) of e.g., the alpha, beta or zeta chain of the T-cell receptor, CD28, CD3 epsilon, CD45, CD4, CD5, CD8 (e.g., CD8 alpha, CD8 beta), CD9, CD16, CD22, CD33, CD37, CD64, CD80, CD86, CD134, CD137, CD154. In some embodiments, a transmembrane domain may include at least the transmembrane region(s) of, e.g., KIRDS2, OX40, CD2, CD27, LFA-1 (CD11a, CD18), ICOS (CD278), 4-1BB (CD137), GITR, CD40, BAFFR, HVEM (LIGHTR), SLAMF7, NKp80 (KLRF1), NKp44, NKp30, NKp46, CD160, CD19, IL2R beta, IL2R gamma, IL7R α, ITGA1, VLA1, CD49a, ITGA4, IA4, CD49D, ITGA6, VLA-6, CD49f, ITGAD, CD11d, ITGAE, CD103, ITGAL, CD11a, LFA-1, ITGAM, CD11b, ITGAX, CD11c, ITGB1, CD29, ITGB2, CD18, LFA-1, ITGB7, TNFR2, DNAM1 (CD226), SLAMF4 (CD244, 2B4), CD84, CD96 (Tactile), CEACAM1, CRTAM, Ly9 (CD229), CD160 (BY55), PSGL1, CD100 (SEMA4D), SLAMF6 (NTB-A, Ly108), SLAM (SLAMF1, CD150, IPO-3), BLAME (SLAMF8), SELPLG (CD162), LTBR, PAG/Cbp, NKG2D, NKG2C, and CD19.

[0491] In some instances, the transmembrane domain can be attached to the extracellular region of the CAR, e.g., the antigen binding domain of the CAR, via a hinge, e.g., a hinge from a human protein. For example, in one embodiment, the hinge can be a human Ig (immunoglobulin) hinge, e.g., an IgG4 hinge, or a CD8a hinge. In one embodiment, the hinge or spacer comprises (e.g., consists of) the amino acid sequence of SEQ ID NO:2. In one aspect, the transmembrane domain comprises (e.g., consists of) a transmembrane domain of SEQ ID NO: 6.

[0492] In one aspect, the hinge or spacer comprises an IgG4 hinge. For example, in one embodiment, the hinge or spacer comprises a hinge of the amino acid sequence ESKYGPPCPPCPAPEFLGGPSVFLFPPKPKDTLMISRTPEVTCVVVDVSQEDPEVQFNW YVDGVEVHNAKTKPREEQFNSTYRVVSVLTVLHQDWLNGKEYKCKVSNKGLPSSIEK TISKAKGQPREPQVYTLPPSQEEMTKNQVSLTCLVKGFYPSDIAVEWESNGQPENNYK TTPPVLDSDGSFFLYSRLTVDKSRWQEGNVFSCSVMHEALHNHYTQKSLSLSLGKM (SEQ ID NO:3). In some embodiments, the hinge or spacer comprises a hinge encoded by a nucleotide sequence of

(SEQ ID NO: 14)

GAGAGCAAGTACGGCCCTCCCTGCCCCCCTTGCCCTGCCCCCGAGTTCCT
GGGCGGACCCAGCGTGTTCCTGTTCCCCCCCAAGCCCAAGGACACCCTGA
TGATCAGCCGGACCCCCGAGGTGACCTGTGTGGTGGTGGACGTGTCCCAG
GAGGACCCCGAGGTCCAGTTCAACTGGTACGTGGACGGCGTGGAGGTGCA
CAACGCCAAGACCAAGCCCCGGGAGGAGCAGTTCAATAGCACCTACCGGG
TGGTGTCCGTGCTGACCGTGCTGCACCAGGACTGGCTGAACGGCAAGGAA
TACAAGTGTAAGGTGTCCAACAAGGGCCTGCCCAGCAGCATCGAGAAAAC
CATCAGCAAGGCCAAGGGCCAGCCTCGGGAGCCCCAGGTGTACACCCTGC
CCCCTAGCCAAGAGGAGATGACCAAGAACCAGGTGTCCCTGACCTGCCTG
GTGAAGGGCTTCTACCCCAGCGACATCGCCGTGGAGTGGGAGAGCAACGG
CCAGCCCGAGAACAACTACAAGACCACCCCCCCTGTGCTGGACAGCGACG
GCAGCTTCTTCCTGTACAGCCGGCTGACCGTGGACAAGAGCCGGTGGCAG
GAGGGCAACGTCTTTAGCTGCTCCGTGATGCACGAGGCCCTGCACAACCA
CTACACCCAGAAGAGCCTGAGCCTGTCCCTGGGCAAGATG.

[0493] In one aspect, the hinge or spacer comprises an IgD hinge. For example, in one embodiment, the hinge or spacer comprises a hinge of the amino acid sequence RWPESPKAQASSVPTAQPQAEGSLAKATTAPATTRNTGRGGEEKKKEKEKEEQEERET KTPECPSHTQPLGVYLLTPAVQDLWLRDKATFTCFVVGSDLKDAHLTWEVAGKVPTG GVEEGLLERHSNGSQSQHSRLTLPRSLWNAGTSVTCTLNHPSLPPQRLMALREPAAQA PVKLSLNLLASSDPPEAASWLLCEVSGFSPPNILLMWLEDQREVNTSGFAPARPPPQPG STTFWAWSVLRVPAPPSPQPATYTCVVSHEDSRTLLNASRSLEVSYVTDH (SEQ ID NO:4). In some embodiments, the hinge or spacer comprises a hinge encoded by a nucleotide sequence of

(SEQ ID NO: 15)

AGGTGGCCCGAAAGTCCCAAGGCCCAGGCATCTAGTGTTCCTACTGCAC
AGCCCCAGGCAGAAGGCAGCCTAGCCAAAGCTACTACTGCACCTGCCAC
TACGCGCAATACTGGCCGTGGCGGGGAGGAGAAGAAAAAGGAGAAAGAG
AAAGAAGAACAGGAAGAGAGGGAGACCAAGACCCCTGAATGTCCATCCC
ATACCCAGCCGCTGGGCGTCTATCTCTTGACTCCCGCAGTACAGGACTT
GTGGCTTAGAGATAAGGCCACCTTTACATGTTTCGTCGTGGGCTCTGAC
CTGAAGGATGCCCATTTGACTTGGGAGGTTGCCGGAAAGGTACCCACAG
GGGGGGTTGAGGAAGGGTTGCTGGAGCGCCATTCCAATGGCTCTCAGAG
CCAGCACTCAAGACTCACCCTTCCGAGATCCCTGTGGAACGCCGGGACC
TCTGTCACATGTACTCTAAATCATCCTAGCCTGCCCCCACAGCGTCTGA
TGGCCCTTAGAGAGCCAGCCGCCCAGGCACCAGTTAAGCTTAGCCTGAA
TCTGCTCGCCAGTAGTGATCCCCCAGAGGCCGCCAGCTGGCTCTTATGC
GAAGTGTCCGGCTTTAGCCCGCCCAACATCTTGCTCATGTGGCTGGAGG
ACCAGCGAGAAGTGAACACCAGCGGCTTCGCTCCAGCCCGGCCCCCACC
CCAGCCGGGTTCTACCACATTCTGGGCCTGGAGTGTCTTAAGGGTCCCA
GCACCACCTAGCCCCCAGCCAGCCACATACACCTGTGTTGTGTCCCATG
AAGATAGCAGGACCCTGCTAAATGCTTCTAGGAGTCTGGAGGTTTCCTA
CGTGACTGACCATT.

[0494] In one aspect, the transmembrane domain may be recombinant, in which case it will comprise predominantly hydrophobic residues such as leucine and valine. In one aspect a triplet of phenylalanine, tryptophan and valine can be found at each end of a recombinant transmembrane domain.

[0495] Optionally, a short oligo- or polypeptide linker, between 2 and 10 amino acids in length may form the linkage between the transmembrane domain and the cytoplasmic region of the CAR. A glycine-serine doublet provides a particularly suitable linker. For example, in one aspect, the linker comprises the amino acid sequence of GGGGSGGGGS (SEQ ID NO:5). In some embodiments, the linker is encoded by a nucleotide sequence of

(SEQ ID NO: 16)

GGTGGCGGAGGTTCTGGAGGTGGAGGTTCC.

[0496] In one aspect, the hinge or spacer comprises a KIR2DS2 hinge.

### Cytoplasmic Domain

[0497] The cytoplasmic domain or region of the present CAR includes an intracellular signaling domain. An intracellular signaling domain is capable of activation of at least one of the normal effector functions of the immune cell in which the CAR has been introduced.

[0498] Examples of intracellular signaling domains for use in the CAR of the invention include the cytoplasmic sequences of the T cell receptor (TCR) and co-receptors that act in concert to initiate signal transduction following antigen receptor engagement, as well as any derivative or variant of these sequences and any recombinant sequence that has the same functional capability.

[0499] It is known that signals generated through the TCR alone are insufficient for full activation of the T cell and that a secondary and/or costimulatory signal is also required. Thus, T cell activation can be said to be mediated by two distinct classes of cytoplasmic signaling sequences: those that initiate antigen-dependent primary activation through the TCR (primary intracellular signaling domains) and those that act in an antigen-independent manner to provide a secondary or costimulatory signal (secondary cytoplasmic domain, e.g., a costimulatory domain).

[0500] A primary signaling domain regulates primary activation of the TCR complex either in a stimulatory way, or in an inhibitory way. Primary intracellular signaling domains that act in a stimulatory manner may contain signaling motifs which are known as immunoreceptor tyrosine-based activation motifs or ITAMs.

[0501] Examples of ITAM containing primary intracellular signaling domains that are of particular use in the invention include those of TCR zeta, FcR gamma, FcR beta, CD3 gamma, CD3 delta, CD3 epsilon, CD5, CD22, CD79a, CD79b, CD278 (also known as “ICOS”), FcεRI, DAP10, DAP12, and CD66d. In one embodiment, a CAR of the invention comprises an intracellular signaling domain, e.g., a primary signaling domain of CD3-zeta.

[0502] In one embodiment, a primary signaling domain comprises a modified ITAM domain, e.g., a mutated ITAM domain which has altered (e.g., increased or decreased) activity as compared to the native ITAM domain. In one embodiment, a primary signaling domain comprises a modified ITAM-containing primary intracellular signaling domain, e.g., an optimized and/or truncated ITAM-containing primary intracellular signaling domain. In an embodiment, a primary signaling domain comprises one, two, three, four or more ITAM motifs.

[0503] Further examples of molecules containing a primary intracellular signaling domain that are of particular use in the invention include those of DAP10, DAP12, and CD32.

[0504] The intracellular signalling domain of the CAR can comprise the primary signalling domain, e.g., CD3-zeta signaling domain, by itself or it can be combined with any other desired intracellular signaling domain(s) useful in the context of a CAR of the invention. For example, the intracellular signaling domain of the CAR can comprise a primary signalling domain, e.g., CD3 zeta chain portion, and a costimulatory signaling domain. The costimulatory signaling domain refers to a portion of the CAR comprising the intracellular domain of a costimulatory molecule. A costimulatory molecule is a cell surface molecule other than an antigen receptor or its ligands that is required for an efficient response of lymphocytes to an antigen. Examples of such molecules include a MHC class I molecule, TNF receptor proteins, Immunoglobulin-like proteins, cytokine receptors, integrins, signaling lymphocytic activation molecules (SLAM proteins), activating NK cell receptors, BTLA, a Toll ligand receptor, OX40, CD2, CD7, CD27, CD28, CD30, CD40, CDS, ICAM-1, LFA-1 (CD11a/CD18), 4-1BB (CD137), B7-H3, CDS, ICAM-1, ICOS (CD278), GITR, BAFFR, LIGHT, HVEM (LIGHTR), KIRDS2, SLAMF7, NKp80 (KLRF1), NKp44, NKp30, NKp46, CD19, CD4, CD8alpha, CD8beta, IL2R beta, IL2R gamma, IL7R alpha, ITGA4, VLA1, CD49a, ITGA4, IA4, CD49D, ITGA6, VLA-6, CD49f, ITGAD, CD11d, ITGAE, CD103, ITGAL, CD11a, LFA-1, ITGAM, CD11b, ITGAX, CD11c, ITGB1, CD29, ITGB2, CD18, LFA-1, ITGB7, NKG2D, NKG2C, TNFR2, TRANCE/RANKL, DNAM1 (CD226), SLAMF4 (CD244, 2B4), CD84, CD96 (Tactile), CEACAM1, CRTAM, Ly9 (CD229), CD160 (BY55), PSGL1, CD100 (SEMA4D), CD69, SLAMF6 (NTB-A, Ly108), SLAM (SLAMF1, CD150, IPO-3), BLAME (SLAMF8), SELPLG (CD162), LTBR, LAT, GADS, SLP-76, PAG/Cbp, CD19a, and a ligand that specifically binds with CD83. For example, CD27 costimulation has been demonstrated to enhance expansion, effector function, and survival of human CART cells in vitro and augments human T cell persistence and antitumor activity in vivo (Song et al. Blood. 2012; 119(3):696-706).

[0505] The intracellular signaling sequences within the cytoplasmic portion of the CAR of the invention may be linked to each other in a random or specified order. Optionally, a short oligo- or polypeptide linker, for example, between 2 and 10 amino acids (e.g., 2, 3, 4, 5, 6, 7, 8, 9, or 10 amino acids) in length may form the linkage between intracellular signaling sequence. In one embodiment, a glycine-serine doublet can be used as a suitable linker. In one embodiment, a single amino acid, e.g., an alanine, a glycine, can be used as a suitable linker.

[0506] In one aspect, the intracellular signaling domain is designed to comprise two or more, e.g., 2, 3, 4, 5, or more, costimulatory signaling domains. In an embodiment, the two or more, e.g., 2, 3, 4, 5, or more, costimulatory signaling domains, are separated by a linker molecule, e.g., a linker molecule described herein. In one embodiment, the intracellular signaling domain comprises two costimulatory signaling domains. In some embodiments, the linker molecule is a glycine residue. In some embodiments, the linker is an alanine residue.

[0507] In one aspect, the intracellular signaling domain is designed to comprise the signaling domain of CD3-zeta and the signaling domain of CD28. In one aspect, the intracellular signaling domain is designed to comprise the signaling domain of CD3-zeta and the signaling domain of 4-1BB. In one aspect, the signaling domain of 4-1BB is a signaling domain of SEQ ID NO: 7. In one aspect, the signaling domain of CD3-zeta is a signaling domain of SEQ ID NO: 9 (mutant CD3-zeta) or SEQ ID NO: 10 (wild type human CD3-zeta).

[0508] In one aspect, the intracellular signaling domain is designed to comprise the signaling domain of CD3-zeta and the signaling domain of CD27. In one aspect, the signaling domain of CD27 comprises an amino acid sequence of QRRKYRSNKGESPVEPAEPCRYSCPREEEGSTIPIQEDYRKPEPACSP (SEQ ID NO:8). In one aspect, the signalling domain of CD27 is encoded by a nucleic acid sequence of

(SEQ ID NO: 19)

AGGAGTAAGAGGAGCAGGCTCCTGCACAGTGACTACATGAACATGACTCC
CCGCCGCCCCGGGCCCACCCGCAAGCATTACCAGCCCTATGCCCCACC
ACGCGACTTCGCAGCCTATCGCTCC.

[0509] In one aspect, the intracellular is designed to comprise the signaling domain of CD3-zeta and the signaling domain of CD28. In one aspect, the signaling domain of CD28 comprises an amino acid sequence of SEQ ID NO: 43. In one aspect, the signaling domain of CD28 is encoded by a nucleic acid sequence of SEQ ID NO: 44.

[0510] In one aspect, the intracellular is designed to comprise the signaling domain of CD3-zeta and the signaling domain of ICOS. In one aspect, the signaling domain of ICOS comprises an amino acid sequence of SEQ ID NO: 45. In one aspect, the signaling domain of ICOS is encoded by a nucleic acid sequence of SEQ ID NO: 46.

[0511] In one aspect, the CAR-expressing cell described herein can further comprise a second CAR, e.g., a second CAR that includes a different antigen binding domain, e.g., to the same target (e.g., CD123 or CD19, or any other antigen described herein) or a different target (e.g., CD19, CD33, CLL-1, CD34, FLT3, or folate receptor beta, or any other antigen described herein). In one embodiment, the second CAR includes an antigen binding domain to a target expressed on acute myeloid leukemia cells, such as, e.g., CD19, CD33, CLL-1, CD34, FLT3, or folate receptor beta. In one embodiment, the CAR-expressing cell comprises a first CAR that targets a first antigen and includes an intracellular signaling domain having a costimulatory signaling domain but not a primary signaling domain, and a second CAR that targets a second, different, antigen and includes an intracellular signaling domain having a primary signaling domain but not a costimulatory signaling domain. While not wishing to be bound by theory, placement of a costimulatory signaling domain, e.g., 4-1BB, CD28, CD27, ICOS or OX-40, onto the first CAR, and the primary signaling domain, e.g., CD3 zeta, on the second CAR can limit the CAR activity to cells where both targets are expressed. In one embodiment, the CAR expressing cell comprises a first CD123 CAR that includes a CD123 binding domain, a transmembrane domain and a costimulatory domain and a second CAR that targets an antigen other than CD123 (e.g., an antigen expressed on AML cells, e.g., CD19, CD33, CLL-1, CD34, FLT3, or folate receptor beta) and includes an antigen binding domain, a transmembrane domain and a primary signaling domain. In another embodiment, the CAR expressing cell comprises a first CD123 CAR that includes a CD123 binding domain, a transmembrane domain and a primary signaling domain and a second CAR that targets an antigen other than CD123 (e.g., an antigen expressed on AML cells, e.g., CD19, CD33, CLL-1, CD34, FLT3, or folate receptor beta) and includes an antigen binding domain to the antigen, a transmembrane domain and a costimulatory signaling domain.

[0512] In one embodiment, the CAR-expressing cell comprises a CAR described herein (e.g., CD123 CAR or CD19 CAR described herein) and an inhibitory CAR. In one embodiment, the inhibitory CAR comprises an antigen binding domain that binds an antigen found on normal cells but not cancer cells, e.g., normal cells that also express CD123 or CD19. In one embodiment, the inhibitory CAR comprises the antigen binding domain, a transmembrane domain and an intracellular domain of an inhibitory molecule. For example, the intracellular domain of the inhibitory CAR can be an intracellular domain of PD1, PD-L1, PD-L2, CTLA4, TIM3, CEACAM (e.g., CEACAM-1, CEACAM-3 and/or CEACAM-5), LAGS, VISTA, BTLA, TIGIT, LAIR1, CD160, 2B4, CD80, CD86, B7-H3 (CD276), B7-H4 (VTCN1), HVEM (TNFRSF14 or CD270), KIR, A2aR, MHC class I, MHC class II, GALS, adenosine, and TGF (e.g., TGF beta).

[0513] In one embodiment, when the CAR-expressing cell comprises two or more different CARs, the antigen binding domains of the different CARs can be such that the antigen binding domains do not interact with one another. For example, a cell expressing a first and second CAR can have an antigen binding domain of the first CAR, e.g., as a fragment, e.g., an scFv, that does not form an association with the antigen binding domain of the second CAR, e.g., the antigen binding domain of the second CAR is a VHH.

[0514] In some embodiments, the antigen binding domain comprises a single domain antigen binding (SDAB) molecules include molecules whose complementary determining regions are part of a single domain polypeptide. Examples include, but are not limited to, heavy chain variable domains, binding molecules naturally devoid of light chains, single domains derived from conventional 4-chain antibodies, engineered domains and single domain scaffolds other than those derived from antibodies. SDAB molecules may be any of the art, or any future single domain molecules. SDAB molecules may be derived from any species including, but not limited to mouse, human, camel, llama, lamprey, fish, shark, goat, rabbit, and bovine. This term also includes naturally occurring single domain antibody molecules from species other than Camelidae and sharks.

[0515] In one aspect, an SDAB molecule can be derived from a variable region of the immunoglobulin found in fish, such as, for example, that which is derived from the immunoglobulin isotype known as Novel Antigen Receptor (NAR) found in the serum of shark. Methods of producing single domain molecules derived from a variable region of NAR (“IgNARs”) are described in WO 03/014161 and Streltsov (2005) Protein Sci. 14:2901-2909.

[0516] According to another aspect, an SDAB molecule is a naturally occurring single domain antigen binding molecule known as heavy chain devoid of light chains. Such single domain molecules are disclosed in WO 9404678 and Hamers-Casterman, C. et al. (1993) Nature 363:446-448, for example. For clarity reasons, this variable domain derived from a heavy chain molecule naturally devoid of light chain is known herein as a VHH or nanobody to distinguish it from the conventional VH of four chain immunoglobulins. Such a VHH molecule can be derived from Camelidae species, for example in camel, llama, dromedary, alpaca and guanaco. Other species besides Camelidae may produce heavy chain molecules naturally devoid of light chain; such VHHs are within the scope of the invention.

[0517] The SDAB molecules can be recombinant, CDR-grafted, humanized, camelized, de-immunized and/or in vitro generated (e.g., selected by phage display).

[0518] It has also been discovered, that cells having a plurality of chimeric membrane embedded receptors comprising an antigen binding domain that interactions between the antigen binding domain of the receptors can be undesirable, e.g., because it inhibits the ability of one or more of the antigen binding domains to bind its cognate antigen. Accordingly, disclosed herein are cells having a first and a second non-naturally occurring chimeric membrane embedded receptor comprising antigen binding domains that minimize such interactions. Also disclosed herein are nucleic acids encoding a first and a second non-naturally occurring chimeric membrane embedded receptor comprising a antigen binding domains that minimize such interactions, as well as methods of making and using such cells and nucleic acids. In an embodiment the antigen binding domain of one of said first said second non-naturally occurring chimeric membrane embedded receptor, comprises an scFv, and the other comprises a single VH domain, e.g., a camelid, shark, or lamprey single VH domain, or a single VH domain derived from a human or mouse sequence.

[0519] In some embodiments, the claimed invention comprises a first and second CAR, wherein the antigen binding domain of one of said first CAR said second CAR does not comprise a variable light domain and a variable heavy domain. In some embodiments, the antigen binding domain of one of said first CAR said second CAR is an scFv, and the other is not an scFv. In some embodiments, the antigen binding domain of one of said first CAR said second CAR comprises a single VH domain, e.g., a camelid, shark, or lamprey single VH domain, or a single VH domain derived from a human or mouse sequence. In some embodiments, the antigen binding domain of one of said first CAR said second CAR comprises a nanobody. In some embodiments, the antigen binding domain of one of said first CAR said second CAR comprises a camelid VHH domain.

[0520] In some embodiments, the antigen binding domain of one of said first CAR said second CAR comprises an scFv, and the other comprises a single VH domain, e.g., a camelid, shark, or lamprey single VH domain, or a single VH domain derived from a human or mouse sequence. In some embodiments, the antigen binding domain of one of said first CAR said second CAR comprises an scFv, and the other comprises a nanobody. In some embodiments, the antigen binding domain of one of said first CAR said second CAR comprises comprises an scFv, and the other comprises a camelid VHH domain.

[0521] In some embodiments, when present on the surface of a cell, binding of the antigen binding domain of said first CAR to its cognate antigen is not substantially reduced by the presence of said second CAR. In some embodiments, binding of the antigen binding domain of said first CAR to its cognate antigen in the presence of said second CAR is 85%, 90%, 95%, 96%, 97%, 98% or 99% of binding of the antigen binding domain of said first CAR to its cognate antigen in the absence of said second CAR.

[0522] In some embodiments, when present on the surface of a cell, the antigen binding domains of said first CAR said second CAR, associate with one another less than if both were scFv antigen binding domains. In some embodiments, the antigen binding domains of said first CAR said second CAR, associate with one another 85%, 90%, 95%, 96%, 97%, 98% or 99% less than if both were scFv antigen binding domains.

[0523] In another aspect, the CAR-expressing cell described herein can further express another agent, e.g., an agent which enhances the activity of a CAR-expressing cell. For example, in one embodiment, the agent can be an agent which inhibits an inhibitory molecule. Inhibitory molecules, e.g., PD1, can, in some embodiments, decrease the ability of a CAR-expressing cell to mount an immune effector response. Examples of inhibitory molecules include PD1, PD-L1, PD-L2, CTLA4, TIM3, CEACAM (e.g., CEACAM-1, CEACAM-3 and/or CEACAM-5), LAG3, VISTA, BTLA, TIGIT, LAIR1, CD160, 2B4, CD80, CD86, B7-H3 (CD276), B7-H4 (VTCN1), HVEM (TNFRSF14 or CD270), KIR, A2aR, MHC class I, MHC class II, GAL9, adenosine, and TGF (e.g., TGF beta). In one embodiment, the agent which inhibits an inhibitory molecule, e.g., is a molecule described herein, e.g., an agent that comprises a first polypeptide, e.g., an inhibitory molecule, associated with a second polypeptide that provides a positive signal to the cell, e.g., an intracellular signaling domain described herein. In one embodiment, the agent comprises a first polypeptide, e.g., of an inhibitory molecule such as PD1, PD-L1, PD-L2, CTLA4, TIM3, CEACAM (e.g., CEACAM-1, CEACAM-3 and/or CEACAM-5), LAG3, VISTA, BTLA, TIGIT, LAIR1, CD160, 2B4, CD80, CD86, B7-H3 (CD276), B7-H4 (VTCN1), HVEM (TNFRSF14 or CD270), KIR, A2aR, MHC class I, MHC class II, GAL9, adenosine, and TGF (e.g., TGF beta), or a fragment of any of these (e.g., at least a portion of an extracellular domain of any of these), and a second polypeptide which is an intracellular signaling domain described herein (e.g., comprising a costimulatory domain (e.g., 41BB, CD27 or CD28, e.g., as described herein) and/or a primary signaling domain (e.g., a CD3 zeta signaling domain described herein). In one embodiment, the agent comprises a first polypeptide of PD1 or a fragment thereof (e.g., at least a portion of an extracellular domain of PD1), and a second polypeptide of an intracellular signaling domain described herein (e.g., a CD28 signaling domain described herein and/or a CD3 zeta signaling domain described herein). In embodiments, the CAR-expressing cell described herein comprises a switch costimulatory receptor, e.g., as described in WO 2013/019615, which is incorporated herein by reference in its entirety. PD1 is an inhibitory member of the CD28 family of receptors that also includes CD28, CTLA-4, ICOS, and BTLA. PD-1 is expressed on activated B cells, T cells and myeloid cells (Agata et al. 1996 Int. Immunol 8:765-75). Two ligands for PD1, PD-L1 and PD-L2 have been shown to downregulate T cell activation upon binding to PD1 (Freeman et a. 2000 J Exp Med 192:1027-34; Latchman et al. 2001 Nat Immunol 2:261-8; Carter et al. 2002 Eur J Immunol 32:634-43). PD-L1 is abundant in human cancers (Dong et al. 2003 J Mol Med 81:281-7; Blank et al. 2005 Cancer Immunol. Immunother 54:307-314; Konishi et al. 2004 Clin Cancer Res 10:5094). Immune suppression can be reversed by inhibiting the local interaction of PD1 with PD-L1.

[0524] In one embodiment, the agent comprises the extracellular domain (ECD) of an inhibitory molecule, e.g., Programmed Death 1 (PD1), can be fused to a transmembrane domain and intracellular signaling domains such as 41BB and CD3 zeta (also referred to herein as a PD1 CAR). In one embodiment, the PD1 CAR, when used incombinations with a CD123 CAR described herein, improves the persistence of the CAR-expressing cell, e.g., T cell or NK cell. In one embodiment, the CAR is a PD1 CAR comprising the extracellular domain of PD1 indicated as underlined in SEQ ID NO: 24. In one embodiment, the PD1 CAR comprises the amino acid sequence of SEQ ID NO:24.

(SEQ ID NO: 24)

Malpvtalllplalllhaarppgwfldspdrpwnpptfspallvvtegdn
atftcsfsntsesfvlnwyrmspsnqtdklaafpedrsqpgqdcrfrvtq
lpngrdfhmsvvrarrndsgtylcgaislapkaqikeslraelrvterra
evptahpspsprpagqfqtlvtttpaprpptpaptiasqplslrpeacrp
aaggavhtrgldfacdiyiwaplagtcgvlllslvitlyckrgrkkllyi
fkqpfmrpvqttqeedgcscrfpeeeeggcelrvkfsrsadapaykqgqn
qlynelnlgrreeydvldkrrgrdpemggkprrknpqeglynelqkdkma
eayseigmkgerrrgkghdglyqglstatkdtydalhmqalppr.

[0525] In one embodiment, the PD1 CAR comprises the amino acid sequence provided below (SEQ ID NO:22).

(SEQ ID NO: 22)

pgwfldspdrpwnpptfspallvvtegdnatftcsfsntsesfvlnwyrm
spsnqtdklaafpedrsqpgqdcrfrvtqlpngrdfhmsvvrarrndsgt
ylcgaislapkaqikeslraelrvterraevptahpspsprpagqfqtlv
tttpaprpptpaptiasqplslrpeacrpaaggavhtrgldfacdiyiwa
plagtcgvlllslvitlyckrgrkkllyifkqpfmrpvqttqeedgcscr
fpeeeeggcelrykfsrsadapaykqgqnqlynelnlgrreeydvldkrr
grdpemggkprrknpqeglynelqkdkmaeayseigmkgerrrgkghdgl
yqglstatkdtydalhmqalppr.

[0526] In one embodiment, the agent comprises a nucleic acid sequence encoding the PD1 CAR, e.g., the PD1 CAR described herein. In one embodiment, the nucleic acid sequence for the PD1 CAR is shown below, with the PD1 ECD underlined below in SEQ ID NO: 23

(SEQ ID NO: 23)
atggccctccctgtcactgccctgcttctccccctcgcactcctgctcca
cgccgctagaccacccggatggtttctggactctccggatcgcccgtgga
atcccccaaccttctcaccggcactcttggttgtgactgagggcgataat
gcgaccttcacgtgctcgttctccaacacctccgaatcattcgtgctgaa
ctggtaccgcatgagcccgtcaaaccagaccgacaagctcgccgcgtttc
cggaagatcggtcgcaaccgggacaggattgtcggttccgcgtgactcaa
ctgccgaatggcagagacttccacatgagcgtggtccgcgctaggcgaaa
cgactccgggacctacctgtgcggagccatctcgctggcgcctaaggccc
aaatcaaagagagcttgagggccgaactgagagtgaccgagcgcagagct
gaggtgccaactgcacatccatccccatcgcctcggcctgcggggcagtt
tcagaccctggtcacgaccactccggcgccgcgcccaccgactccggccc
caactatcgcgagccagcccctgtcgctgaggccggaagcatgccgccct
gccgccggaggtgctgtgcatacccggggattggacttcgcatgcgacat
ctacatttgggctcctctcgccggaacttgtggcgtgctccttctgtccc
tggtcatcaccctgtactgcaagcggggtcggaaaaagcttctgtacatt
ttcaagcagcccttcatgaggcccgtgcaaaccacccaggaggaggacgg
ttgctcctgccggttccccgaagaggaagaaggaggttgcgagctgcgcg
tgaagttctcccggagcgccgacgcccccgcctataagcagggccagaac
cagctgtacaacgaactgaacctgggacggcgggaagagtacgatgtgct
ggacaagcggcgcggccgggaccccgaaatgggcgggaagcctagaagaa
agaaccctcaggaaggcctgtataacgagctgcagaaggacaagatggcc
gaggcctactccgaaattgggatgaagggagagcggcggaggggaaaggg
gcacgacggcctgtaccaaggactgtccaccgccaccaaggacacatacg
atgccctgcacatgcaggcccttccccctcgc.

[0527] In another aspect, the present invention provides a population of CAR-expressing cells, e.g., CART cells or CAR-expressing NK cells. In some embodiments, the population of CAR-expressing cells comprises a mixture of cells expressing different CARs. For example, in one embodiment, the population of CAR-expressing cells (e.g., CART cells or CAR-expressing NK cells) can include a first cell expressing a CAR having an antigen binding domain (e.g., tumor antigen binding domain, e.g., B cell antigen binding domain, e.g., CD123 binding domain or CD19 binding domain) described herein, and a second cell expressing a CAR having a different antigen binding domain (e.g., tumor antigen binding domain, e.g., B cell antigen binding domain, e.g., CD123 binding domain or CD19 binding domain), e.g., an antigen binding domain described herein that differs from the antigen binding domain in the CAR expressed by the first cell. As another example, the population of CAR-expressing cells can include a first cell expressing a CAR that includes a CD123 binding domain, e.g., as described herein, and a second cell expressing a CAR that includes an antigen binding domain to a target other than CD123 (e.g., CD33, CD34, CLL-1, FLT3, CD19, CD20, CD22, or folate receptor beta). In one embodiment, the population of CAR-expressing cells includes, e.g., a first cell expressing a CAR that includes a primary intracellular signaling domain, and a second cell expressing a CAR that includes a secondary signaling domain, e.g., a costimulatory signaling domain.

[0528] In another aspect, the present invention provides a population of cells wherein at least one cell in the population expresses a CAR having antigen binding domain (e.g., tumor antigen binding domain, e.g., B cell antigen binding domain, e.g., CD123 binding domain or CD19 binding domain) described herein, and a second cell expressing another agent, e.g., an agent which enhances the activity of a CAR-expressing cell. For example, in one embodiment, the agent can be an agent which inhibits an inhibitory molecule. Inhibitory molecules, e.g., can, in some embodiments, decrease the ability of a CAR-expressing cell to mount an immune effector response. Examples of inhibitory molecules include PD1, PD-L1, PD-L2, CTLA4, TIM3, CEACAM (e.g., CEACAM-1, CEACAM-3 and/or CEACAM-5), LAG3, VISTA, BTLA, TIGIT, LAIR1, CD160, 2B4, CD80, CD86, B7-H3 (CD276), B7-H4 (VTCN1), HVEM (TNFRSF14 or CD270), KIR, A2aR, MHC class I, MHC class II, GAL9, adenosine, and TGF (e.g., TGF beta). In one embodiment, the agent which inhibits an inhibitory molecule, e.g., is a molecule described herein, e.g., an agent that comprises a first polypeptide, e.g., an inhibitory molecule, associated with a second polypeptide that provides a positive signal to the cell, e.g., an intracellular signaling domain described herein. In one embodiment, the agent comprises a first polypeptide, e.g., of an inhibitory molecule such as PD1, PD-L1, PD-L2, CTLA4, TIM3, CEACAM (e.g., CEACAM-1, CEACAM-3 and/or CEACAM-5), LAG3, VISTA, BTLA, TIGIT, LAIR1, CD160, 2B4, CD80, CD86, B7-H3 (CD276), B7-H4 (VTCN1), HVEM (TNFRSF14 or CD270), KIR, A2aR, MHC class I, MHC class II, GAL9, adenosine, and TGF (e.g., TGF beta), or a fragment of any of these (e.g., at least a portion of an extracellular domain of any of these), and a second polypeptide which is an intracellular signaling domain described herein (e.g., comprising a costimulatory domain (e.g., 41BB, CD27 or CD28, e.g., as described herein) and/or a primary signaling domain (e.g., a CD3 zeta signaling domain described herein). In one embodiment, the agent comprises a first polypeptide of PD1 or a fragment thereof (e.g., at least a portion of the extracellular domain of PD1), and a second polypeptide of an intracellular signaling domain described herein (e.g., a CD28 signaling domain described herein and/or a CD3 zeta signaling domain described herein).

[0529] In one aspect, the present invention provides methods comprising administering a population of CAR-expressing cells, e.g., CART cells or CAR-expressing NK cells, e.g., a mixture of cells expressing different CARs, in combination with another agent, e.g., a kinase inhibitor, such as a kinase inhibitor described herein. In another aspect, the present invention provides methods comprising administering a population of cells wherein at least one cell in the population expresses a CAR having an anti-cancer associated antigen binding domain as described herein, and a second cell expressing another agent, e.g., an agent which enhances the activity of a CAR-expressing cell, in combination with another agent, e.g., a kinase inhibitor, such as a kinase inhibitor described herein.

### Natural Killer Cell Receptor (NKR) CARs

[0530] In an embodiment, the CAR molecule described herein comprises one or more components of a natural killer cell receptor (NKR), thereby forming an NKR-CAR. The NKR component can be a transmembrane domain, a hinge domain, or a cytoplasmic domain from any of the following natural killer cell receptors: killer cell immunoglobulin-like receptor (KIR), e.g., KIR2DL1, KIR2DL2/L3, KIR2DL4, KIR2DL5A, KIR2DL5B, KIR2DS1, KIR2DS2, KIR2DS3, KIR2DS4, DIR2DS5, KIR3DL1/S1, KIR3DL2, KIR3DL3, KIR2DP1, and KIR3DP1; natural cyotoxicity receptor (NCR), e.g., NKp30, NKp44, NKp46; signaling lymphocyte activation molecule (SLAM) family of immune cell receptors, e.g., CD48, CD229, 2B4, CD84, NTB-A, CRACC, BLAME, and CD2F-10; Fc receptor (FcR), e.g., CD16, and CD64; and Ly49 receptors, e.g., LY49A, LY49C. The NKR-CAR molecules described herein may interact with an adaptor molecule or intracellular signaling domain, e.g., DAP12. Exemplary configurations and sequences of CAR molecules comprising NKR components are described in International Publication No. WO2014/145252, the contents of which are hereby incorporated by reference.

### Split CAR

[0531] In some embodiments, the CAR-expressing cell uses a split CAR. The split CAR approach is described in more detail in publications WO2014/055442 and WO2014/055657, incorporated herein by reference. Briefly, a split CAR system comprises a cell expressing a first CAR having a first antigen binding domain and a costimulatory domain (e.g., 4-1BB), and the cell also expresses a second CAR having a second antigen binding domain and an intracellular signaling domain (e.g., CD3 zeta). When the cell encounters the first antigen, the costimulatory domain is activated, and the cell proliferates. When the cell encounters the second antigen, the intracellular signaling domain is activated and cell-killing activity begins. Thus, the CAR-expressing cell is only fully activated in the presence of both antigens. In embodiments the first antigen binding domain recognizes an antigen described herein (e.g., a B cell antigen, e.g., CD123 or CD19), e.g., comprises an antigen binding domain described herein, and the second antigen binding domain recognizes an antigen expressed on acute myeloid leukemia cells, e.g., CLL-1, CD33, CD34, FLT3, or folate receptor beta. In embodiments the first antigen binding domain recognizes CD123, e.g., comprises an antigen binding domain described herein, and the second antigen binding domain recognizes an antigen expressed on B-cells, e.g., CD19, CD20, CD22 or ROR1.

### Strategies for Regulating Chimeric Antigen Receptors

[0532] There are many ways CAR activities can be regulated. In some embodiments, a regulatable CAR (RCAR) where the CAR activity can be controlled is desirable to optimize the safety and efficacy of a CAR therapy. For example, inducing apoptosis using, e.g., a caspase fused to a dimerization domain (see, e.g., Di et al., N Engl. J. Med. 2011 Nov. 3; 365(18):1673-1683), can be used as a safety switch in the CAR therapy of the instant invention. In another example, CAR-expressing cells can also express an inducible Caspase-9 (iCaspase-9) molecule that, upon administration of a dimerizer drug (e.g., rimiducid (also called AP1903 (Bellicum Pharmaceuticals) or AP20187 (Ariad)) leads to activation of the Caspase-9 and apoptosis of the cells. The iCaspase-9 molecule contains a chemical inducer of dimerization (CID) binding domain that mediates dimerization in the presence of a CID. This results in inducible and selective depletion of CAR-expressing cells. In some cases, the iCaspase-9 molecule is encoded by a nucleic acid molecule separate from the CAR-encoding vector(s). In some cases, the iCaspase-9 molecule is encoded by the same nucleic acid molecule as the CAR-encoding vector. The iCaspase-9 can provide a safety switch to avoid any toxicity of CAR-expressing cells. See, e.g., Song et al. Cancer Gene Ther. 2008; 15(10):667-75; Clinical Trial Id. No. NCT02107963; and Di Stasi et al. N. Engl. J. Med. 2011; 365:1673-83.

[0533] Alternative strategies for regulating the CAR therapy of the instant invention include utilizing small molecules or antibodies that deactivate or turn off CAR activity, e.g., by deleting CAR-expressing cells, e.g., by inducing antibody dependent cell-mediated cytotoxicity (ADCC). For example, CAR-expressing cells described herein may also express an antigen that is recognized by molecules capable of inducing cell death, e.g., ADCC or complement-induced cell death. For example, CAR expressing cells described herein may also express a receptor capable of being targeted by an antibody or antibody fragment. Examples of such receptors include EpCAM, VEGFR, integrins (e.g., integrins ανβ3, α4, αI¾β3, α4β7, α5β1, ανβ3, αν), members of the TNF receptor superfamily (e.g., TRAIL-R1, TRAIL-R2), PDGF Receptor, interferon receptor, folate receptor, GPNMB, ICAM-1, HLA-DR, CEA, CA-125, MUC1, TAG-72, IL-6 receptor, 5T4, GD2, GD3, CD2, CD3, CD4, CD5, CD1 1, CD1 1 a/LFA-1, CD15, CD18/ITGB2, CD19, CD20, CD22, CD23/1gE Receptor, CD25, CD28, CD30, CD33, CD38, CD40, CD41, CD44, CD51, CD52, CD62L, CD74, CD80, CD125, CD147/basigin, CD152/CTLA-4, CD154/CD40L, CD195/CCR5, CD319/SLAMF7, and EGFR, and truncated versions thereof (e.g., versions preserving one or more extracellular epitopes but lacking one or more regions within the cytoplasmic domain).

[0534] For example, a CAR-expressing cell described herein may also express a truncated epidermal growth factor receptor (EGFR) which lacks signaling capacity but retains the epitope that is recognized by molecules capable of inducing ADCC, e.g., cetuximab (ERBITUX®), such that administration of cetuximab induces ADCC and subsequent depletion of the CAR-expressing cells (see, e.g., WO2011/056894, and Jonnalagadda et al., Gene Ther. 2013; 20(8)853-860). Another strategy includes expressing a highly compact marker/suicide gene that combines target epitopes from both CD32 and CD20 antigens in the CAR-expressing cells described herein, which binds rituximab, resulting in selective depletion of the CAR-expressing cells, e.g., by ADCC (see, e.g., Philip et al., Blood. 2014; 124(8)1277-1287). Other methods for depleting CAR-expressing cells described herein include administration of CAMPATH, a monoclonal anti-CD52 antibody that selectively binds and targets mature lymphocytes, e.g., CAR-expressing cells, for destruction, e.g., by inducing ADCC. In other embodiments, the CAR-expressing cell can be selectively targeted using a CAR ligand, e.g., an anti-idiotypic antibody. In some embodiments, the anti-idiotypic antibody can cause effector cell activity, e.g, ADCC or ADC activities, thereby reducing the number of CAR-expressing cells. In other embodiments, the CAR ligand, e.g., the anti-idiotypic antibody, can be coupled to an agent that induces cell killing, e.g., a toxin, thereby reducing the number of CAR-expressing cells. Alternatively, the CAR molecules themselves can be configured such that the activity can be regulated, e.g., turned on and off, as described below.

[0535] In other embodiments, a CAR-expressing cell described herein may also express a target protein recognized by the T cell depleting agent. In one embodiment, the target protein is CD20 and the T cell depleting agent is an anti-CD20 antibody, e.g., rituximab. In such embodiment, the T cell depleting agent is administered once it is desirable to reduce or eliminate the CAR-expressing cell, e.g., to mitigate the CAR induced toxicity. In other embodiments, the T cell depleting agent is an anti-CD52 antibody, e.g., alemtuzumab, as described in the Examples herein.

[0536] In other embodiments, a RCAR comprises a set of polypeptides, typically two in the simplest embodiments, in which the components of a standard CAR described herein, e.g., an antigen binding domain and an intracellular signaling domain, are partitioned on separate polypeptides or members. In some embodiments, the set of polypeptides include a dimerization switch that, upon the presence of a dimerization molecule, can couple the polypeptides to one another, e.g., can couple an antigen binding domain to an intracellular signaling domain. Additional description and exemplary configurations of such regulatable CARs are provided herein and in International Publication No. WO 2015/090229, hereby incorporated by reference in its entirety.

[0537] In an aspect, an RCAR comprises two polypeptides or members: 1) an intracellular signaling member comprising an intracellular signaling domain, e.g., a primary intracellular signaling domain described herein, and a first switch domain; 2) an antigen binding member comprising an antigen binding domain, e.g., that specifically binds a tumor antigen described herein, as described herein and a second switch domain. Optionally, the RCAR comprises a transmembrane domain described herein. In an embodiment, a transmembrane domain can be disposed on the intracellular signaling member, on the antigen binding member, or on both. (Unless otherwise indicated, when members or elements of an RCAR are described herein, the order can be as provided, but other orders are included as well. In other words, in an embodiment, the order is as set out in the text, but in other embodiments, the order can be different. E.g., the order of elements on one side of a transmembrane region can be different from the example, e.g., the placement of a switch domain relative to a intracellular signaling domain can be different, e.g., reversed).

[0538] In an embodiment, the first and second switch domains can form an intracellular or an extracellular dimerization switch. In an embodiment, the dimerization switch can be a homodimerization switch, e.g., where the first and second switch domain are the same, or a heterodimerization switch, e.g., where the first and second switch domain are different from one another.

[0539] In embodiments, an RCAR can comprise a “multi switch.” A multi switch can comprise heterodimerization switch domains or homodimerization switch domains. A multi switch comprises a plurality of, e.g., 2, 3, 4, 5, 6, 7, 8, 9, or 10, switch domains, independently, on a first member, e.g., an antigen binding member, and a second member, e.g., an intracellular signaling member. In an embodiment, the first member can comprise a plurality of first switch domains, e.g., FKBP-based switch domains, and the second member can comprise a plurality of second switch domains, e.g., FRB-based switch domains. In an embodiment, the first member can comprise a first and a second switch domain, e.g., a FKBP-based switch domain and a FRB-based switch domain, and the second member can comprise a first and a second switch domain, e.g., a FKBP-based switch domain and a FRB-based switch domain.

[0540] In an embodiment, the intracellular signaling member comprises one or more intracellular signaling domains, e.g., a primary intracellular signaling domain and one or more costimulatory signaling domains.

[0541] In an embodiment, the antigen binding member may comprise one or more intracellular signaling domains, e.g., one or more costimulatory signaling domains. In an embodiment, the antigen binding member comprises a plurality, e.g., 2 or 3 costimulatory signaling domains described herein, e.g., selected from 4-1BB, CD28, CD27, ICOS, and OX40, and in embodiments, no primary intracellular signaling domain. In an embodiment, the antigen binding member comprises the following costimulatory signaling domains, from the extracellular to intracellular direction: 4-1BB-CD27; 4-1BB-CD27; CD27-4-1BB; 4-1BB-CD28; CD28-4-1BB; OX40-CD28; CD28-OX40; CD28-4-1BB; or 4-1BB-CD28. In such embodiments, the intracellular binding member comprises a CD3zeta domain. In one such embodiment the RCAR comprises (1) an antigen binding member comprising, an antigen binding domain, a transmembrane domain, and two costimulatory domains and a first switch domain; and (2) an intracellular signaling domain comprising a transmembrane domain or membrane tethering domain and at least one primary intracellular signaling domain, and a second switch domain.

[0542] An embodiment provides RCARs wherein the antigen binding member is not tethered to the surface of the CAR cell. This allows a cell having an intracellular signaling member to be conveniently paired with one or more antigen binding domains, without transforming the cell with a sequence that encodes the antigen binding member. In such embodiments, the RCAR comprises: 1) an intracellular signaling member comprising: a first switch domain, a transmembrane domain, an intracellular signaling domain, e.g., a primary intracellular signaling domain, and a first switch domain; and 2) an antigen binding member comprising: an antigen binding domain, and a second switch domain, wherein the antigen binding member does not comprise a transmembrane domain or membrane tethering domain, and, optionally, does not comprise an intracellular signaling domain. In some embodiments, the RCAR may further comprise 3) a second antigen binding member comprising: a second antigen binding domain, e.g., a second antigen binding domain that binds a different antigen than is bound by the antigen binding domain; and a second switch domain.

[0543] Also provided herein are RCARs wherein the antigen binding member comprises bispecific activation and targeting capacity. In this embodiment, the antigen binding member can comprise a plurality, e.g., 2, 3, 4, or 5 antigen binding domains, e.g., scFvs, wherein each antigen binding domain binds to a target antigen, e.g. different antigens or the same antigen, e.g., the same or different epitopes on the same antigen. In an embodiment, the plurality of antigen binding domains are in tandem, and optionally, a linker or hinge region is disposed between each of the antigen binding domains. Suitable linkers and hinge regions are described herein.

[0544] An embodiment provides RCARs having a configuration that allows switching of proliferation. In this embodiment, the RCAR comprises: 1) an intracellular signaling member comprising: optionally, a transmembrane domain or membrane tethering domain; one or more co-stimulatory signaling domain, e.g., selected from 4-1BB, CD28, CD27, ICOS, and OX40, and a switch domain; and 2) an antigen binding member comprising: an antigen binding domain, a transmembrane domain, and a primary intracellular signaling domain, e.g., a CD3zeta domain, wherein the antigen binding member does not comprise a switch domain, or does not comprise a switch domain that dimerizes with a switch domain on the intracellular signaling member. In an embodiment, the antigen binding member does not comprise a co-stimulatory signaling domain. In an embodiment, the intracellular signaling member comprises a switch domain from a homodimerization switch. In an embodiment, the intracellular signaling member comprises a first switch domain of a heterodimerization switch and the RCAR comprises a second intracellular signaling member which comprises a second switch domain of the heterodimerization switch. In such embodiments, the second intracellular signaling member comprises the same intracellular signaling domains as the intracellular signaling member. In an embodiment, the dimerization switch is intracellular. In an embodiment, the dimerization switch is extracellular.

[0545] In any of the RCAR configurations described here, the first and second switch domains comprise a FKBP-FRB based switch as described herein.

[0546] Also provided herein are cells comprising an RCAR described herein. Any cell that is engineered to express a RCAR can be used as a RCARX cell. In an embodiment the RCARX cell is a T cell, and is referred to as a RCART cell. In an embodiment the RCARX cell is an NK cell, and is referred to as a RCARN cell.

[0547] Also provided herein are nucleic acids and vectors comprising RCAR encoding sequences. Sequence encoding various elements of an RCAR can be disposed on the same nucleic acid molecule, e.g., the same plasmid or vector, e.g., viral vector, e.g., lentiviral vector. In an embodiment, (i) sequence encoding an antigen binding member and (ii) sequence encoding an intracellular signaling member, can be present on the same nucleic acid, e.g., vector. Production of the corresponding proteins can be achieved, e.g., by the use of separate promoters, or by the use of a bicistronic transcription product (which can result in the production of two proteins by cleavage of a single translation product or by the translation of two separate protein products). In an embodiment, a sequence encoding a cleavable peptide, e.g., a P2A or F2A sequence, is disposed between (i) and (ii). In an embodiment, a sequence encoding an IRES, e.g., an EMCV or EV71 IRES, is disposed between (i) and (ii). In these embodiments, (i) and (ii) are transcribed as a single RNA. In an embodiment, a first promoter is operably linked to (i) and a second promoter is operably linked to (ii), such that (i) and (ii) are transcribed as separate mRNAs.

[0548] Alternatively, the sequence encoding various elements of an RCAR can be disposed on the different nucleic acid molecules, e.g., different plasmids or vectors, e.g., viral vector, e.g., lentiviral vector. E.g., the (i) sequence encoding an antigen binding member can be present on a first nucleic acid, e.g., a first vector, and the (ii) sequence encoding an intracellular signaling member can be present on the second nucleic acid, e.g., the second vector.

### Dimerization Switches

[0549] Dimerization switches can be non-covalent or covalent. In a non-covalent dimerization switch, the dimerization molecule promotes a non-covalent interaction between the switch domains. In a covalent dimerization switch, the dimerization molecule promotes a covalent interaction between the switch domains.

[0550] In an embodiment, the RCAR comprises a FKBP/FRAP, or FKBP/FRB,-based dimerization switch. FKBP12 (FKBP, or FK506 binding protein) is an abundant cytoplasmic protein that serves as the initial intracellular target for the natural product immunosuppressive drug, rapamycin. Rapamycin binds to FKBP and to the large PI3K homolog FRAP (RAFT, mTOR). FRB is a 93 amino acid portion of FRAP, that is sufficient for binding the FKBP-rapamycin complex (Chen, J., Zheng, X. F., Brown, E. J. & Schreiber, S. L. (1995) Identification of an 11-kDa FKBP12-rapamycin-binding domain within the 289-kDa FKBP12-rapamycin-associated protein and characterization of a critical serine residue. Proc Natl Acad Sci USA 92: 4947-51.)

[0551] In embodiments, an FKBP/FRAP, e.g., an FKBP/FRB, based switch can use a dimerization molecule, e.g., rapamycin or a rapamycin analog.

[0552] The amino acid sequence of FKBP is as follows:

(SEQ ID NO: 588)

D V P D Y A S L G G P S S P K K K R K V S R G V Q
V E T I S P G D G R T F P K R G Q T C V V H Y T G
M L E D G K K F D S S R D R N K P F K F M L G K Q
E V I R G W E E G V A Q M S V G Q R A K L T I S P
D Y A Y G A T G H P G I I P P H A T L V F D V E L
L K L E T S Y

[0553] In embodiments, an FKBP switch domain can comprise a fragment of FKBP having the ability to bind with FRB, or a fragment or analog thereof, in the presence of rapamycin or a rapalog, e.g., the underlined portion of SEQ ID NO: 588, which is:

(SEQ ID NO: 589)

V Q V E T I S P G D G R T F P K R G Q T C V V H Y
T G M L E D G K K F D S S R D R N K P F K F M L
G K Q E V I R G W E E G V A Q M S V G Q R A K L
T I S P D Y A Y G A T G H P G I I P P H A T L V F
D V E L L K L E T S

[0554] The amino acid sequence of FRB is as follows:

(SEQ ID NO: 590)

[sequence omitted]

[0555] “FKBP/FRAP, e.g., an FKBP/FRB, based switch” as that term is used herein, refers to a dimerization switch comprising: a first switch domain, which comprises an FKBP fragment or analog thereof having the ability to bind with FRB, or a fragment or analog thereof, in the presence of rapamycin or a rapalog, e.g., RAD001, and has at least 70, 75, 80, 85, 90, 95, 96, 97, 98, or 99% identity with, or differs by no more than 30, 25, 20, 15, 10, 5, 4, 3, 2, or 1 amino acid residues from, the FKBP sequence of SEQ ID NO: 588 or 589; and a second switch domain, which comprises an FRB fragment or analog thereof having the ability to bind with FRB, or a fragment or analog thereof, in the presence of rapamycin or a rapalog, and has at least 70, 75, 80, 85, 90, 95, 96, 97, 98, or 99% identity with, or differs by no more than 30, 25, 20, 15, 10, 5, 4, 3, 2, or 1 amino acid residues from, the FRB sequence of SEQ ID NO: 590. In an embodiment, a RCAR described herein comprises one switch domain comprising amino acid residues disclosed in SEQ ID NO: 588 (or SEQ ID NO: 589), and one switch domain comprising amino acid residues disclosed in SEQ ID NO: 590.

[0556] In embodiments, the FKBP/FRB dimerization switch comprises a modified FRB switch domain that exhibits altered, e.g., enhanced, complex formation between an FRB-based switch domain, e.g., the modified FRB switch domain, a FKBP-based switch domain, and the dimerization molecule, e.g., rapamycin or a rapalogue, e.g., RAD001. In an embodiment, the modified FRB switch domain comprises one or more mutations, e.g., 2, 3, 4, 5, 6, 7, 8, 9, 10 or more, selected from mutations at amino acid position(s) L2031, E2032, S2035, R2036, F2039, G2040, T2098, W2101, D2102, Y2105, and F2108, where the wild-type amino acid is mutated to any other naturally-occurring amino acid. In an embodiment, a mutant FRB comprises a mutation at E2032, where E2032 is mutated to phenylalanine (E2032F), methionine (E2032M), arginine (E2032R), valine (E2032V), tyrosine (E2032Y), isoleucine (E2032I), e.g., SEQ ID NO: 591, or leucine (E2032L), e.g., SEQ ID NO: 592. In an embodiment, a mutant FRB comprises a mutation at T2098, where T2098 is mutated to phenylalanine (T2098F) or leucine (T2098L), e.g., SEQ ID NO: 593. In an embodiment, a mutant FRB comprises a mutation at E2032 and at T2098, where E2032 is mutated to any amino acid, and where T2098 is mutated to any amino acid, e.g., SEQ ID NO: 594. In an embodiment, a mutant FRB comprises an E2032I and a T2098L mutation, e.g., SEQ ID NO: 595. In an embodiment, a mutant FRB comprises an E2032L and a T2098L mutation, e.g., SEQ ID NO: 596.

TABLE 17A
Exemplary mutant FRB having increased affinity for a
dimerization molecule.

| | | SEQ |
|---|---|---|
| | | ID |
| FRB mutant | Amino Acid Sequence | NO: |
| E2032I mutant | ILWHEMWHEGLIEASRLYFGERNVKGMFEVLEPLHAMMER | 591 |
| | GPQTLKETSFNQAYGRDLMEAQEWCRKYMKSGNVKDLTQ | |
| | AWDLYYHVFRRISKTS | |
| E2032L mutant | ILWHEMWHEGLLEASRLYFGERNVKGMFEVLEPLHAMME | 592 |
| | RGPQTLKETSFNQAYGRDLMEAQEWCRKYMKSGNVKDLT | |
| | QAWDLYYHVFRRISKTS | |
| T2098 L mutant | ILWHEMWHEGLEEASRLYFGERNVKGMFEVLEPLHAMME | 593 |
| | RGPQTLKETSFNQAYGRDLMEAQEWCRKYMKSGNVKDLL | |
| | QAWDLYYHVFRRISKTS | |
| E2032, T2098 | ILWHEMWHEGLXEASRLYFGERNVKGMFEVLEPLHAMME | 594 |
| mutant | RGPQTLKETSFNQAYGRDLMEAQEWCRKYMKSGNVKDLX | |
| | QAWDLYYHVFRRISKTS | |
| E2032I, T2098L | ILWHEMWHEGLIEASRLYFGERNVKGMFEVLEPLHAMMER | 595 |
| mutant | GPQTLKETSFNQAYGRDLMEAQEWCRKYMKSGNVKDLLQ | |
| | AWDLYYHVFRRISKTS | |
| E2032L, | ILWHEMWHEGLLEASRLYFGERNVKGMFEVLEPLHAMME | 596 |
| T2098L | RGPQTLKETSFNQAYGRDLMEAQEWCRKYMKSGNVKDLL | |
| mutant | QAWDLYYHVFRRISKTS | |

[0557] Other suitable dimerization switches include a GyrB-GyrB based dimerization switch, a Gibberellin-based dimerization switch, a tag/binder dimerization switch, and a halo-tag/snap-tag dimerization switch. Following the guidance provided herein, such switches and relevant dimerization molecules will be apparent to one of ordinary skill.

### Dimerization Molecule

[0558] Association between the switch domains is promoted by the dimerization molecule. In the presence of dimerization molecule interaction or association between switch domains allows for signal transduction between a polypeptide associated with, e.g., fused to, a first switch domain, and a polypeptide associated with, e.g., fused to, a second switch domain. In the presence of non-limiting levels of dimerization molecule signal transduction is increased by 1.1, 1.2, 1.3, 1.4, 1.5, 1.6, 1.7, 1.8, 1.9, 2, 5, 10, 50, 100 fold, e.g., as measured in a system described herein.

[0559] Rapamycin and rapamycin analogs (sometimes referred to as rapalogues), e.g., RAD001, can be used as dimerization molecules in a FKBP/FRB-based dimerization switch described herein. In an embodiment the dimerization molecule can be selected from rapamycin (sirolimus), RAD001 (everolimus), zotarolimus, temsirolimus, AP-23573 (ridaforolimus), biolimus and AP21967. Additional rapamycin analogs suitable for use with FKBP/FRB-based dimerization switches are further described in the section entitled “Combination Therapies”, or in the subsection entitled “Combination with a low dose mTOR inhibitor”.

Co-Expression of CAR with a Chemokine Receptor

[0560] In embodiments, the CAR-expressing cell described herein further comprises a chemokine receptor molecule. Transgenic expression of chemokine receptors CCR2b or CXCR2 in T cells enhances trafficking to CCL2- or CXCL1-secreting solid tumors including melanoma and neuroblastoma (Craddock et al., J Immunother. 2010 October; 33(8):780-8 and Kershaw et al., Hum Gene Ther. 2002 Nov. 1; 13(16):1971-80). Thus, without wishing to be bound by theory, it is believed that chemokine receptors expressed in CAR-expressing cells that recognize chemokines secreted by tumors, e.g., solid tumors, can improve homing of the CAR-expressing cell to the tumor, facilitate the infiltration of the CAR-expressing cell to the tumor, and enhances antitumor efficacy of the CAR-expressing cell. The chemokine receptor molecule can comprise a naturally occurring or recombinant chemokine receptor or a chemokine-binding fragment thereof. A chemokine receptor molecule suitable for expression in a CAR-expressing cell described herein include a CXC chemokine receptor (e.g., CXCR1, CXCR2, CXCR3, CXCR4, CXCR5, CXCR6, or CXCR7), a CC chemokine receptor (e.g., CCR1, CCR2, CCR3, CCR4, CCR5, CCR6, CCR7, CCR8, CCR9, CCR10, or CCR11), a CX3C chemokine receptor (e.g., CX3CR1), a XC chemokine receptor (e.g., XCR1), or a chemokine-binding fragment thereof. In one embodiment, the chemokine receptor molecule to be expressed with a CAR described herein is selected based on the chemokine(s) secreted by the tumor. In one embodiment, the CAR-expressing cell described herein further comprises, e.g., expresses, a CCR2b receptor or a CXCR2 receptor. In an embodiment, the CAR described herein and the chemokine receptor molecule are on the same vector or are on two different vectors. In embodiments where the CAR described herein and the chemokine receptor molecule are on the same vector, the CAR and the chemokine receptor molecule are each under control of two different promoters or are under the control of the same promoter.

### RNA Transfection

[0561] Disclosed herein are methods for producing an in vitro transcribed RNA CAR. The present invention also includes a CAR encoding RNA construct that can be directly transfected into a cell. A method for generating mRNA for use in transfection can involve in vitro transcription (IVT) of a template with specially designed primers, followed by polyA addition, to produce a construct containing 3′ and 5′ untranslated sequence (“UTR”), a 5′ cap and/or Internal Ribosome Entry Site (IRES), the nucleic acid to be expressed, and a polyA tail, typically 50-2000 bases in length (SEQ ID NO:35). RNA so produced can efficiently transfect different kinds of cells. In one aspect, the template includes sequences for the CAR.

[0562] In one aspect the CAR described herein, e.g., CD123 CAR or CD19 CAR, is encoded by a messenger RNA (mRNA). In one aspect the mRNA encoding the CAR, e.g., CD123 CAR or CD19 CAR, is introduced into a T cell for production of a CART cell.

[0563] Additional methods of RNA transfection are described on pages 192-196 of International Application WO 2016/164731, filed Apr. 8, 2016, which is incorporated by reference in its entirety.

### Non-Viral Delivery Methods

[0564] In some aspects, non-viral methods can be used to deliver a nucleic acid encoding a CAR described herein into a cell or tissue or a subject.

[0565] In some embodiments, the non-viral method includes the use of a transposon (also called a transposable element). In some embodiments, a transposon is a piece of DNA that can insert itself at a location in a genome, for example, a piece of DNA that is capable of self-replicating and inserting its copy into a genome, or a piece of DNA that can be spliced out of a longer nucleic acid and inserted into another place in a genome.

[0566] Additional and exemplary transposons and non-viral delivery methods are described on pages 196-198 of International Application WO 2016/164731, filed Apr. 8, 2016, which is incorporated by reference in its entirety.

### Nucleic Acid Constructs Encoding a CAR

[0567] In accordance with any method or composition described herein, a CAR can be encoded by a nucleic acid construct. Exemplary nucleic acid molecules encoding one or more CAR constructs are described herein. In embodiments, the nucleic acid molecule is provided as a messenger RNA transcript. In embodiments, the nucleic acid molecule is provided as a DNA construct.

[0568] In embodiments, the nucleic acid molecule comprises an isolated nucleic acid molecule encoding a chimeric antigen receptor (CAR), wherein the CAR comprises an antigen binding domain (e.g., CD123 or CD19 binding domain (e.g., a humanized or human CD123 or CD19 binding domain), a transmembrane domain, and an intracellular signaling domain comprising a stimulatory domain, e.g., a costimulatory signaling domain and/or a primary signaling domain, e.g., zeta chain.

[0569] In one embodiment, the antigen binding domain (e.g., CD123 binding domain) is an antigen binding domain (e.g., CD123 binding domain) described herein, e.g., an CD123 binding domain which comprises a sequence selected from a group consisting of SEQ ID NO: 157-160, 184-215, 478, 480, 483, 485, and 556-587, or a sequence with at least 95%, e.g., 95-99% identity thereof. In one embodiment, the CD123 binding domain comprises a human CD123 binding domain which comprises a sequence selected from a group consisting of SEQ ID NO: 157-160, 478, 480, 483, and 485. In one embodiment, the CD123 binding domain comprises a humanized CD123 binding domain which comprises a sequence selected from a group consisting of SEQ ID NO: 184-215, and 556-587.

[0570] In one embodiment, the anti-CD19 binding domain is an anti-CD19 binding domain described herein, e.g., an anti-CD19 binding domain which comprises a sequence selected from a group consisting of SEQ ID NO: 710-721, 734-745, 771, 774, 775, 777, or 780, or a sequence with at least 95%, e.g., 95-99% identify thereof.

[0571] In one embodiment, the transmembrane domain is transmembrane domain of a protein, e.g., described herein, e.g., selected from the group consisting of the alpha, beta or zeta chain of the T-cell receptor, CD28, CD3 epsilon, CD45, CD4, CD5, CD8, CD9, CD16, CD22, CD33, CD37, CD64, CD80, CD86, CD134, CD137 and CD154. In one embodiment, the transmembrane domain comprises a sequence of SEQ ID NO: 6, or a sequence with at least 95%, e.g., 95-99% identity thereof. In one embodiment, the CD123 binding domain is connected to the transmembrane domain by a hinge region, e.g., a hinge described herein. In one embodiment, the hinge region comprises SEQ ID NO:2 or SEQ ID NO:3 or SEQ ID NO:4 or SEQ ID NO:5, or a sequence with at least 95%, e.g., 95-99% identity thereof.

[0572] In one embodiment, the isolated nucleic acid molecule further comprises a sequence encoding a costimulatory domain. In one embodiment, the costimulatory domain is a functional signaling domain of a protein, e.g., described herein, e.g., selected from the group consisting of a MHC class I molecule, a TNF receptor protein, an Immunoglobulin-like protein, a cytokine receptor, an integrin, a signaling lymphocytic activation molecule (SLAM protein), an activating NK cell receptor, BTLA, a Toll ligand receptor, OX40, CD2, CD7, CD27, CD28, CD30, CD40, CDS, ICAM-1, LFA-1 (CD11a/CD18), 4-1BB (CD137), B7-H3, CDS, ICAM-1, ICOS (CD278), GITR, BAFFR, LIGHT, HVEM (LIGHTR), KIRDS2, SLAMF7, NKp80 (KLRF1), NKp44, NKp30, NKp46, CD19, CD4, CD8alpha, CD8beta, IL2R beta, IL2R gamma, IL7R alpha, ITGA4, VLA1, CD49a, ITGA4, IA4, CD49D, ITGA6, VLA-6, CD49f, ITGAD, CD11d, ITGAE, CD103, ITGAL, CD11a, LFA-1, ITGAM, CD11b, ITGAX, CD11c, ITGB1, CD29, ITGB2, CD18, LFA-1, ITGB7, NKG2D, NKG2C, TNFR2, TRANCE/RANKL, DNAM1 (CD226), SLAMF4 (CD244, 2B4), CD84, CD96 (Tactile), CEACAM1, CRTAM, Ly9 (CD229), CD160 (BY55), PSGL1, CD100 (SEMA4D), CD69, SLAMF6 (NTB-A, Ly108), SLAM (SLAMF1, CD150, IPO-3), BLAME (SLAMF8), SELPLG (CD162), LTBR, LAT, GADS, SLP-76, PAG/Cbp, CD19a, and a ligand that specifically binds with CD83.

[0573] In one embodiment, the costimulatory domain comprises a sequence of SEQ ID NO:7, or a sequence with at least 95%, e.g., 95-99%, identity thereof. In one embodiment, the intracellular signaling domain comprises a functional signaling domain of 4-1BB and a functional signaling domain of CD3 zeta. In one embodiment, the intracellular signaling domain comprises the sequence of SEQ ID NO: 7 or SEQ ID NO:8, or a sequence with at least 95%, e.g., 95-99%, identity thereof, and the sequence of SEQ ID NO: 9 or SEQ ID NO:10, or a sequence with at least 95%, e.g., 95-99%, identity thereof, wherein the sequences comprising the intracellular signaling domain are expressed in the same frame and as a single polypeptide chain.

[0574] In another aspect, the invention pertains to an isolated nucleic acid molecule encoding a CAR construct comprising a leader sequence of SEQ ID NO: 1, a scFv domain having a sequence selected from the group consisting of SEQ ID NOS: 157-160, 184-215, 478, 480, 483, 485, and 556-587 (or a sequence with at least 95%, e.g., 95-99%, identity thereof), a hinge region of SEQ ID NO:2 or SEQ ID NO:3 or SEQ ID NO:4 or SEQ ID NO:5 (or a sequence with at least 95%, e.g., 95-99%, identity thereof), a transmembrane domain having a sequence of SEQ ID NO: 6 (or a sequence with at least 95%, e.g., 95-99%, identity thereof), a 4-1BB costimulatory domain having a sequence of SEQ ID NO:7 or a CD27 costimulatory domain having a sequence of SEQ ID NO:8 (or a sequence with at least 95%, e.g., 95-99%, identity thereof)) or a CD28 costimulatory domain having a sequence of SEQ ID NO:43 (or a sequence with at least 95%, e.g., 95-99%, identity thereof) or a ICOS costimulatory domain having a sequence of SEQ ID NO: 45 (or a sequence with at least 95%, e.g., 95-99%, identity thereof), and a CD3 zeta stimulatory domain having a sequence of SEQ ID NO:9 or SEQ ID NO:10 (or a sequence with at least 95%, e.g., 95-99%, identity thereof).

[0575] In another aspect, the invention pertains to an isolated nucleic acid molecule encoding a CAR construct comprising a leader sequence of SEQ ID NO: 1, a scFv domain having a sequence selected from the group consisting of SEQ ID NO: 710-721, 734-745, 771, 774, 775, 777, and 780 (or a sequence with at least 95%, e.g., 95-99%, identify thereof), a hinge region of SEQ ID NO: 2, SEQ ID NO:3, SEQ ID NO:4, SEQ ID NO:5, SEQ ID NO: 16, or SEQ ID NO: 39 (or a sequence with at least 95%, e.g., 95-99%, identity thereof), a transmembrane domain having a sequence of SEQ ID NO: 6 (or a sequence with at least 95%, e.g., 95-99%, identity thereof), a 4-1BB costimulatory domain having a sequence of SEQ ID NO: 7 (or a sequence with at least 95%, e.g., 95-99%, identity thereof) or a CD27 costimulatory domain having a sequence of SEQ ID NO: 8 (or a sequence with at least 95%, e.g., 95-99%, identity thereof), and a CD3 zeta stimulatory domain having a sequence of SEQ ID NO: 9 or SEQ ID NO: 10 (or a sequence with at least 95%, e.g., 95-99%, identity thereof).

[0576] In another aspect, the invention pertains to an isolated polypeptide molecule encoded by the nucleic acid molecule. In one embodiment, the isolated polypeptide molecule comprises a sequence selected from the group consisting of SEQ ID NO: 98-101 and 125-156, or a sequence with at least 95%, e.g., 95-99%, identity thereof.

[0577] In another aspect, the invention pertains to an isolated polypeptide molecule encoded by the nucleic acid molecule. In one embodiment, the isolated polypeptide molecule comprises a sequence selected from the group consisting of SEQ ID NO: 758-769, 773, 776, 778, 779, and 781, or a sequence with at least 95%, e.g., 95-99%, identity thereof.

[0578] In another aspect, the invention pertains to a nucleic acid molecule encoding a chimeric antigen receptor (CAR) molecule that comprises a CD123 binding domain, a transmembrane domain, and an intracellular signaling domain comprising a stimulatory domain, and wherein said CD123 binding domain comprises a sequence selected from the group consisting of SEQ ID NO: 157-160, 184-215, 478, 480, 483, 485, and 556-587, or a sequence with at least 95%, e.g., 95-99%, identity thereof. In one embodiment, the CD123 binding domain comprises a human CD123 binding domain comprising a sequence selected from the group consisting of SEQ ID NO: 157-160, 478, 480, 483, and 485, or a sequence with at least 95%, e.g., 95-99%, identity thereof. In one embodiment, the CD123 binding domain comprises a humanized CD123 binding domain comprising a sequence selected from the group consisting of SEQ ID NO: 184-215, and 556-587, or a sequence with at least 95%, e.g., 95-99%, identity thereof. In another aspect, the invention pertains to an isolated nucleic acid molecule encoding a chimeric antigen receptor (CAR) molecule that comprises an anti-CD19 binding domain, a transmembrane domain, and an intracellular signaling domain comprising a stimulatory domain, and wherein the nucleic acid encoding the anti-CD19 binding domain comprises a sequence selected from the group consisting of SEQ ID NOs: 710-721, 734-745, 771, 774, 775, 777, and 780, or a sequence with at least 95%, e.g., 95-99%, identify thereof.

[0579] In one embodiment, the encoded CAR molecule further comprises a sequence encoding a costimulatory domain. In one embodiment, the costimulatory domain is a functional signaling domain of a protein selected from the group consisting of a MHC class I molecule, a TNF receptor protein, an Immunoglobulin-like protein, a cytokine receptor, an integrin, a signaling lymphocytic activation molecule (SLAM protein), an activating NK cell receptor, BTLA, a Toll ligand receptor, OX40, CD2, CD7, CD27, CD28, CD30, CD40, CDS, ICAM-1, LFA-1 (CD11a/CD18), 4-1BB (CD137), B7-H3, CDS, ICAM-1, ICOS (CD278), GITR, BAFFR, LIGHT, HVEM (LIGHTR), KIRDS2, SLAMF7, NKp80 (KLRF1), NKp44, NKp30, NKp46, CD19, CD4, CD8alpha, CD8beta, IL2R beta, IL2R gamma, IL7R alpha, ITGA4, VLA1, CD49a, ITGA4, IA4, CD49D, ITGA6, VLA-6, CD49f, ITGAD, CD11d, ITGAE, CD103, ITGAL, CD11a, LFA-1, ITGAM, CD11b, ITGAX, CD11c, ITGB1, CD29, ITGB2, CD18, LFA-1, ITGB7, NKG2D, NKG2C, TNFR2, TRANCE/RANKL, DNAM1 (CD226), SLAMF4 (CD244, 2B4), CD84, CD96 (Tactile), CEACAM1, CRTAM, Ly9 (CD229), CD160 (BY55), PSGL1, CD100 (SEMA4D), CD69, SLAMF6 (NTB-A, Ly108), SLAM (SLAMF1, CD150, IPO-3), BLAME (SLAMF8), SELPLG (CD162), LTBR, LAT, GADS, SLP-76, PAG/Cbp, CD19a, and a ligand that specifically binds with CD83. In one embodiment, the costimulatory domain comprises a sequence of SEQ ID NO:7.

[0580] In one embodiment, the transmembrane domain is a transmembrane domain of a protein selected from the group consisting of the alpha, beta or zeta chain of the T-cell receptor, CD28, CD3 epsilon, CD45, CD4, CD5, CD8, CD9, CD16, CD22, CD33, CD37, CD64, CD80, CD86, CD134, CD137, CD154, a MHC class I molecule, a TNF receptor protein, an Immunoglobulin-like protein, a cytokine receptor, an integrin, a signaling lymphocytic activation molecule (SLAM protein), an activating NK cell receptor, BTLA, a Toll ligand receptor, OX40, CD2, CD7, CD27, CD28, CD30, CD40, CDS, ICAM-1, LFA-1 (CD11a/CD18), 4-1BB (CD137), B7-H3, CDS, ICAM-1, ICOS (CD278), GITR, BAFFR, LIGHT, HVEM (LIGHTR), KIRDS2, SLAMF7, NKp80 (KLRF1), NKp44, NKp30, NKp46, CD19, CD4, CD8alpha, CD8beta, IL2R beta, IL2R gamma, IL7R alpha, ITGA4, VLA1, CD49a, ITGA4, IA4, CD49D, ITGA6, VLA-6, CD49f, ITGAD, CD11d, ITGAE, CD103, ITGAL, CD11a, LFA-1, ITGAM, CD11b, ITGAX, CD11c, ITGB1, CD29, ITGB2, CD18, LFA-1, ITGB7, NKG2D, NKG2C, TNFR2, TRANCE/RANKL, DNAM1 (CD226), SLAMF4 (CD244, 2B4), CD84, CD96 (Tactile), CEACAM1, CRTAM, Ly9 (CD229), CD160 (BY55), PSGL1, CD100 (SEMA4D), CD69, SLAMF6 (NTB-A, Ly108), SLAM (SLAMF1, CD150, IPO-3), BLAME (SLAMF8), SELPLG (CD162), LTBR, LAT, GADS, SLP-76, PAG/Cbp, CD19a, and a ligand that specifically binds with CD83.

[0581] In one embodiment, the transmembrane domain comprises a sequence of SEQ ID NO:6. In one embodiment, the intracellular signaling domain comprises a functional signaling domain of 4-1BB and a functional signaling domain of zeta. In one embodiment, the intracellular signaling domain comprises the sequence of SEQ ID NO: 7 and the sequence of SEQ ID NO:9, wherein the sequences comprising the intracellular signaling domain are expressed in the same frame and as a single polypeptide chain. In one embodiment, the CD123 binding domain is connected to the transmembrane domain by a hinge region. In one embodiment, the hinge region comprises SEQ ID NO:2. In one embodiment, the hinge region comprises SEQ ID NO:3 or SEQ ID NO:4 or SEQ ID NO:5.

[0582] In another aspect, the invention pertains to an encoded CAR molecule comprising a leader sequence of SEQ ID NO: 1, a scFv domain having a sequence selected from the group consisting of SEQ ID NO: 157-160, 184-215, 478, 480, 483, 485, 556-587, or a sequence with at least 95%, e.g., 95-99%, identity thereof, a hinge region of SEQ ID NO:2 or SEQ ID NO:3 or SEQ ID NO:4 or SEQ ID NO:5, a transmembrane domain having a sequence of SEQ ID NO: 6, a 4-1BB costimulatory domain having a sequence of SEQ ID NO:7 or a CD27 costimulatory domain having a sequence of SEQ ID NO:8 or a CD28 costimulatory domain having a sequence of SEQ ID NO:43 or an ICOS costimulatory domain having a sequence of SEQ ID NO: 45, and a CD3 zeta stimulatory domain having a sequence of SEQ ID NO:9 or SEQ ID NO:10. In one embodiment, the encoded CAR molecule comprises a sequence selected from a group consisting of SEQ ID NO: 98-101 and 125-156, or a sequence with at least 95%, e.g., 95-99%, identity thereof.

[0583] In another aspect, the invention pertains to an isolated CAR molecule comprising a leader sequence of SEQ ID NO: 1, a scFv domain having a sequence selected from the group consisting of SEQ ID NOS: 710-721, 734-745, 771, 774, 775, 777, and 780, or a sequence with at least 95%, e.g., 95-99%, identify thereof, a hinge region of SEQ ID NO:2, SEQ ID NO: 3, SEQ ID NO: 4, SEQ ID NO: 5, SEQ ID NO: 16, or SEQ ID NO: 39, a transmembrane domain having a sequence of SEQ ID NO: 6, a 4-1BB costimulatory domain having a sequence of SEQ ID NO: 7 or a CD27 costimulatory domain having a sequence of SEQ ID NO: 8, and a CD3 zeta stimulatory domain having a sequence of SEQ ID NO: 9 or SEQ ID NO: 10. In one embodiment, the encoded CAR molecule comprises a sequence selected from the group consisting of SEQ ID NOS:710-721, 758-769, 771, and 773-792, or a sequence with at least 95%, e.g., 95-99%, identify thereof.

[0584] The nucleic acid sequences coding for the desired molecules can be obtained using recombinant methods known in the art, such as, for example by screening libraries from cells expressing the gene, by deriving the gene from a vector known to include the same, or by isolating directly from cells and tissues containing the same, using standard techniques. Alternatively, the gene of interest can be produced synthetically, rather than cloned.

### Vectors

[0585] The present invention also provides vectors in which a DNA of the present invention is inserted. Vectors derived from retroviruses such as the lentivirus are suitable tools to achieve long-term gene transfer since they allow long-term, stable integration of a transgene and its propagation in daughter cells. Lentiviral vectors have the added advantage over vectors derived from onco-retroviruses such as murine leukemia viruses in that they can transduce non-proliferating cells, such as hepatocytes. They also have the added advantage of low immunogenicity. A retroviral vector may also be, e.g., a gammaretroviral vector. A gammaretroviral vector may include, e.g., a promoter, a packaging signal (w), a primer binding site (PBS), one or more (e.g., two) long terminal repeats (LTR), and a transgene of interest, e.g., a gene encoding a CAR. A gammaretroviral vector may lack viral structural gens such as gag, pol, and env. Exemplary gammaretroviral vectors include Murine Leukemia Virus (MLV), Spleen-Focus Forming Virus (SFFV), and Myeloproliferative Sarcoma Virus (MPSV), and vectors derived therefrom. Other gammaretroviral vectors are described, e.g., in Tobias Maetzig et al., “Gammaretroviral Vectors: Biology, Technology and Application” Viruses. 2011 June; 3(6): 677-713.

[0586] In another embodiment, the vector comprising the nucleic acid encoding the desired CAR of the invention is an adenoviral vector (A5/35). In another embodiment, the expression of nucleic acids encoding CARs can be accomplished using of transposons such as sleeping beauty, crisper, CAS9, and zinc finger nucleases. See below June et al. 2009Nature Reviews Immunology 9.10: 704-716, is incorporated herein by reference.

[0587] In brief summary, the expression of natural or synthetic nucleic acids encoding CARs is typically achieved by operably linking a nucleic acid encoding the CAR polypeptide or portions thereof to a promoter, and incorporating the construct into an expression vector. The vectors can be suitable for replication and integration eukaryotes. Typical cloning vectors contain transcription and translation terminators, initiation sequences, and promoters useful for regulation of the expression of the desired nucleic acid sequence.

[0588] The expression constructs of the present invention may also be used for nucleic acid immunization and gene therapy, using standard gene delivery protocols. Methods for gene delivery are known in the art. See, e.g., U.S. Pat. Nos. 5,399,346, 5,580,859, 5,589,466, incorporated by reference herein in their entireties. In another embodiment, the invention provides a gene therapy vector.

[0589] The nucleic acid can be cloned into a number of types of vectors. For example, the nucleic acid can be cloned into a vector including, but not limited to a plasmid, a phagemid, a phage derivative, an animal virus, and a cosmid. Vectors of particular interest include expression vectors, replication vectors, probe generation vectors, and sequencing vectors.

[0590] Further, the expression vector may be provided to a cell in the form of a viral vector. Viral vector technology is well known in the art and is described, for example, in Sambrook et al., 2012, MOLECULAR CLONING: A LABORATORY MANUAL, volumes 1-4, Cold Spring Harbor Press, NY), and in other virology and molecular biology manuals. Viruses, which are useful as vectors include, but are not limited to, retroviruses, adenoviruses, adeno-associated viruses, herpes viruses, and lentiviruses. In general, a suitable vector contains an origin of replication functional in at least one organism, a promoter sequence, convenient restriction endonuclease sites, and one or more selectable markers, (e.g., WO 01/96584; WO 01/29058; and U.S. Pat. No. 6,326,193).

[0591] A number of viral based systems have been developed for gene transfer into mammalian cells. For example, retroviruses provide a convenient platform for gene delivery systems. A selected gene can be inserted into a vector and packaged in retroviral particles using techniques known in the art. The recombinant virus can then be isolated and delivered to cells of the subject either in vivo or ex vivo. A number of retroviral systems are known in the art. In some embodiments, adenovirus vectors are used. A number of adenovirus vectors are known in the art. In one embodiment, lentivirus vectors are used.

[0592] Additional promoter elements, e.g., enhancers, regulate the frequency of transcriptional initiation. Typically, these are located in the region 30-110 bp upstream of the start site, although a number of promoters have been shown to contain functional elements downstream of the start site as well. The spacing between promoter elements frequently is flexible, so that promoter function is preserved when elements are inverted or moved relative to one another. In the thymidine kinase (tk) promoter, the spacing between promoter elements can be increased to 50 bp apart before activity begins to decline. Depending on the promoter, it appears that individual elements can function either cooperatively or independently to activate transcription.

[0593] An example of a promoter that is capable of expressing a CAR transgene in a mammalian T cell is the EF1a promoter. The native EF1a promoter drives expression of the alpha subunit of the elongation factor-1 complex, which is responsible for the enzymatic delivery of aminoacyl tRNAs to the ribosome. The EF1a promoter has been extensively used in mammalian expression plasmids and has been shown to be effective in driving CAR expression from transgenes cloned into a lentiviral vector. See, e.g., Milone et al., Mol. Ther. 17(8): 1453-1464 (2009). In one aspect, the EF1a promoter comprises the sequence provided as SEQ ID NO:11.

[0594] Another example of a promoter is the immediate early cytomegalovirus (CMV) promoter sequence. This promoter sequence is a strong constitutive promoter sequence capable of driving high levels of expression of any polynucleotide sequence operatively linked thereto. However, other constitutive promoter sequences may also be used, including, but not limited to the simian virus 40 (SV40) early promoter, mouse mammary tumor virus (MMTV), human immunodeficiency virus (HIV) long terminal repeat (LTR) promoter, MoMuLV promoter, an avian leukemia virus promoter, an Epstein-Barr virus immediate early promoter, a Rous sarcoma virus promoter, as well as human gene promoters such as, but not limited to, the actin promoter, the myosin promoter, the elongation factor-1□ promoter, the hemoglobin promoter, and the creatine kinase promoter. Further, the invention should not be limited to the use of constitutive promoters. Inducible promoters are also contemplated as part of the invention. The use of an inducible promoter provides a molecular switch capable of turning on expression of the polynucleotide sequence which it is operatively linked when such expression is desired, or turning off the expression when expression is not desired. Examples of inducible promoters include, but are not limited to a metallothionine promoter, a glucocorticoid promoter, a progesterone promoter, and a tetracycline promoter.

[0595] Another example of a promoter is the phosphoglycerate kinase (PGK) promoter. In embodiments, a truncated PGK promoter (e.g., a PGK promoter with one or more, e.g., 1, 2, 5, 10, 100, 200, 300, or 400, nucleotide deletions when compared to the wild-type PGK promoter sequence) may be desired. The nucleotide sequences of exemplary PGK promoters are provided below.

[0596] WT PGK Promoter

(SEQ ID NO: 597)

ACCCCTCTCTCCAGCCACTAAGCCAGTTGCTCCCTCGGCTGACGGCTGCA
CGCGAGGCCTCCGAACGTCTTACGCCTTGTGGCGCGCCCGTCCTTGTCCC
GGGTGTGATGGCGGGGTGTGGGGCGGAGGGCGTGGCGGGGAAGGGCCGGC
GACGAGAGCCGCGCGGGACGACTCGTCGGCGATAACCGGTGTCGGGTAGC
GCCAGCCGCGCGACGGTAACGAGGGACCGCGACAGGCAGACGCTCCCATG
ATCACTCTGCACGCCGAAGGCAAATAGTGCAGGCCGTGCGGCGCTTGGCG
TTCCTTGGAAGGGCTGAATCCCCGCCTCGTCCTTCGCAGCGGCCCCCCGG
GTGTTCCCATCGCCGCTTCTAGGCCCACTGCGACGCTTGCCTGCACTTCT
TACACGCTCTGGGTCCCAGCCGCGGCGACGCAAAGGGCCTTGGTGCGGGT
CTCGTCGGCGCAGGGACGCGTTTGGGTCCCGACGGAACCTTTTCCGCGTT
GGGGTTGGGGCACCATAAGCT

[0597] Exemplary Truncated PGK Promoters:

PGK100:

(SEQ ID NO: 598)

ACCCCTCTCTCCAGCCACTAAGCCAGTTGCTCCCTCGGCTGACGGCTGCA
CGCGAGGCCTCCGAACGTCTTACGCCTTGTGGCGCGCCCGTCCTTGTCCC
GGGTGTGATGGCGGGGTG
PGK200:

(SEQ ID NO: 599)

ACCCCTCTCTCCAGCCACTAAGCCAGTTGCTCCCTCGGCTGACGGCTGCA
CGCGAGGCCTCCGAACGTCTTACGCCTTGTGGCGCGCCCGTCCTTGTCCC
GGGTGTGATGGCGGGGTGTGGGGCGGAGGGCGTGGCGGGGAAGGGCCGGC
GACGAGAGCCGCGCGGGACGACTCGTCGGCGATAACCGGTGTCGGGTAGC
GCCAGCCGCGCGACGGTAACG
PGK300:

(SEQ ID NO: 600)

ACCCCTCTCTCCAGCCACTAAGCCAGTTGCTCCCTCGGCTGACGGCTGCA
CGCGAGGCCTCCGAACGTCTTACGCCTTGTGGCGCGCCCGTCCTTGTCCC
GGGTGTGATGGCGGGGTGTGGGGCGGAGGGCGTGGCGGGGAAGGGCCGGC
GACGAGAGCCGCGCGGGACGACTCGTCGGCGATAACCGGTGTCGGGTAGC
GCCAGCCGCGCGACGGTAACGAGGGACCGCGACAGGCAGACGCTCCCATG
ATCACTCTGCACGCCGAAGGCAAATAGTGCAGGCCGTGCGGCGCTTGGCG
TTCCTTGGAAGGGCTGAATCCCCG
PGK400:

(SEQ ID NO: 601)

ACCCCTCTCTCCAGCCACTAAGCCAGTTGCTCCCTCGGCTGACGGCTGCA
CGCGAGGCCTCCGAACGTCTTACGCCTTGTGGCGCGCCCGTCCTTGTCCC
GGGTGTGATGGCGGGGTGTGGGGCGGAGGGCGTGGCGGGGAAGGGCCGGC
GACGAGAGCCGCGCGGGACGACTCGTCGGCGATAACCGGTGTCGGGTAGC
GCCAGCCGCGCGACGGTAACGAGGGACCGCGACAGGCAGACGCTCCCATG
ATCACTCTGCACGCCGAAGGCAAATAGTGCAGGCCGTGCGGCGCTTGGCG
TTCCTTGGAAGGGCTGAATCCCCGCCTCGTCCTTCGCAGCGGCCCCCCGG
GTGTTCCCATCGCCGCTTCTAGGCCCACTGCGACGCTTGCCTGCACTTCT
TACACGCTCTGGGTCCCAGCCG

[0598] A vector may also include, e.g., a signal sequence to facilitate secretion, a polyadenylation signal and transcription terminator (e.g., from Bovine Growth Hormone (BGH) gene), an element allowing episomal replication and replication in prokaryotes (e.g. SV40 origin and ColE1 or others known in the art) and/or elements to allow selection (e.g., ampicillin resistance gene and/or zeocin marker).

[0599] In order to assess the expression of a CAR polypeptide or portions thereof, the expression vector to be introduced into a cell can also contain either a selectable marker gene or a reporter gene or both to facilitate identification and selection of expressing cells from the population of cells sought to be transfected or infected through viral vectors. In other aspects, the selectable marker may be carried on a separate piece of DNA and used in a co-transfection procedure. Both selectable markers and reporter genes may be flanked with appropriate regulatory sequences to enable expression in the host cells. Useful selectable markers include, for example, antibiotic-resistance genes, such as neo and the like.

[0600] Reporter genes are used for identifying potentially transfected cells and for evaluating the functionality of regulatory sequences. In general, a reporter gene is a gene that is not present in or expressed by the recipient organism or tissue and that encodes a polypeptide whose expression is manifested by some easily detectable property, e.g., enzymatic activity. Expression of the reporter gene is assayed at a suitable time after the DNA has been introduced into the recipient cells. Suitable reporter genes may include genes encoding luciferase, beta-galactosidase, chloramphenicol acetyl transferase, secreted alkaline phosphatase, or the green fluorescent protein gene (e.g., Ui-Tei et al., 2000 FEBS Letters 479: 79-82). Suitable expression systems are well known and may be prepared using known techniques or obtained commercially. In general, the construct with the minimal 5′ flanking region showing the highest level of expression of reporter gene is identified as the promoter. Such promoter regions may be linked to a reporter gene and used to evaluate agents for the ability to modulate promoter-driven transcription.

[0601] In one embodiment, the vector can further comprise a nucleic acid encoding a second CAR. In one embodiment, the second CAR includes an antigen binding domain to a target expressed on acute myeloid leukemia cells, such as, e.g., CD33, CD34, CLL-1, FLT3, or folate receptor beta. In one embodiment, the vector comprises a nucleic aicd sequence encoding a first CAR that targets a first antigen and includes an intracellular signaling domain having a costimulatory signaling domain but not a primary signaling domain, and a nucleic acid encoding a second CAR that targets a second, different, antigen and includes an intracellular signaling domain having a primary signaling domain but not a costimulatory signaling domain. In one embodiment, the vector comprises a nucleic acid encoding a first CD123 CAR that includes a CD123 binding domain, a transmembrane domain and a costimulatory domain and a nucleic acid encoding a second CAR that targets an antigen other than CD123 (e.g., an antigen expressed on AML cells, e.g., CD33, CD34, CLL-1, FLT3, or folate receptor beta) and includes an antigen binding domain, a transmembrane domain and a primary signaling domain. In another embodiment, the vector comprises a nucleic acid encoding a first CD123 CAR that includes a CD123 binding domain, a transmembrane domain and a primary signaling domain and a nucleic acid encoding a second CAR that targets an antigen other than CD123 (e.g., an antigen expressed on AML cells, e.g., CD33, CLL-1, CD34, FLT3, or folate receptor beta) and includes an antigen binding domain to the antigen, a transmembrane domain and a costimulatory signaling domain.

[0602] In one embodiment, the vector comprises a nucleic acid encoding a CD123 CAR described herein and a nucleic acid encoding an inhibitory CAR. In one embodiment, the inhibitory CAR comprises an antigen binding domain that binds an antigen found on normal cells but not cancer cells, e.g., normal cells that also express CD123. In one embodiment, the inhibitory CAR comprises the antigen binding domain, a transmembrane domain and an intracellular domain of an inhibitory molecule. For example, the intracellular domain of the inhibitory CAR can be an intracellular domain of PD1, PD-L1, PD-L2, CTLA4, TIM3, CEACAM (e.g., CEACAM-1, CEACAM-3 and/or CEACAM-5), LAGS, VISTA, BTLA, TIGIT, LAIR1, CD160, 2B4, CD80, CD86, B7-H3 (CD276), B7-H4 (VTCN1), HVEM (TNFRSF14 or CD270), KIR, A2aR, MHC class I, MHC class II, GALS, adenosine, and TGF beta.

[0603] In embodiments, the vector may comprise two or more nucleic acid sequences encoding a CAR, e.g., a CD123 CAR described herein and a second CAR, e.g., an inhibitory CAR or a CAR that specifically binds to an antigen other than CD123 (e.g., an antigen expressed on AML cells, e.g., CLL-1, CD33, CD34, FLT3, or folate receptor beta). In such embodiments, the two or more nucleic acid sequences encoding the CAR are encoded by a single nucleic molecule in the same frame and as a single polypeptide chain. In this aspect, the two or more CARs, can, e.g., be separated by one or more peptide cleavage sites. (e.g., an auto-cleavage site or a substrate for an intracellular protease). Examples of peptide cleavage sites include the following, wherein the GSG residues are optional:

T2A:

(SEQ ID NO: 602)

(GSG) E G R G S L L T C G D V E E N P G P
P2A:

(SEQ ID NO: 603)

(GSG) A T N F S L L K Q A G D V E E N P G P
E2A:

(SEQ ID NO: 604)

(GSG) Q C T N Y A L L K L A G D V E S N P G P
F2A:

(SEQ ID NO: 605)

(GSG) V K Q T L N F D L L K L A G D V E S N P G P

[0604] Methods of introducing and expressing genes into a cell are known in the art. In the context of an expression vector, the vector can be readily introduced into a host cell, e.g., mammalian, bacterial, yeast, or insect cell by any method in the art. For example, the expression vector can be transferred into a host cell by physical, chemical, or biological means.

[0605] Physical methods for introducing a polynucleotide into a host cell include calcium phosphate precipitation, lipofection, particle bombardment, microinjection, electroporation, and the like. Methods for producing cells comprising vectors and/or exogenous nucleic acids are well-known in the art. See, for example, Sambrook et al., 2012, MOLECULAR CLONING: A LABORATORY MANUAL, volumes 1-4, Cold Spring Harbor Press, NY). A preferred method for the introduction of a polynucleotide into a host cell is calcium phosphate transfection Biological methods for introducing a polynucleotide of interest into a host cell include the use of DNA and RNA vectors. Viral vectors, and especially retroviral vectors, have become the most widely used method for inserting genes into mammalian, e.g., human cells. Other viral vectors can be derived from lentivirus, poxviruses, herpes simplex virus I, adenoviruses and adeno-associated viruses, and the like. See, for example, U.S. Pat. Nos. 5,350,674 and 5,585,362.

[0606] Chemical means for introducing a polynucleotide into a host cell include colloidal dispersion systems, such as macromolecule complexes, nanocapsules, microspheres, beads, and lipid-based systems including oil-in-water emulsions, micelles, mixed micelles, and liposomes. An exemplary colloidal system for use as a delivery vehicle in vitro and in vivo is a liposome (e.g., an artificial membrane vesicle). Other methods of state-of-the-art targeted delivery of nucleic acids are available, such as delivery of polynucleotides with targeted nanoparticles or other suitable sub-micron sized delivery system.

[0607] In the case where a non-viral delivery system is utilized, an exemplary delivery vehicle is a liposome. The use of lipid formulations is contemplated for the introduction of the nucleic acids into a host cell (in vitro, ex vivo or in vivo). In another aspect, the nucleic acid may be associated with a lipid. The nucleic acid associated with a lipid may be encapsulated in the aqueous interior of a liposome, interspersed within the lipid bilayer of a liposome, attached to a liposome via a linking molecule that is associated with both the liposome and the oligonucleotide, entrapped in a liposome, complexed with a liposome, dispersed in a solution containing a lipid, mixed with a lipid, combined with a lipid, contained as a suspension in a lipid, contained or complexed with a micelle, or otherwise associated with a lipid. Lipid, lipid/DNA or lipid/expression vector associated compositions are not limited to any particular structure in solution. For example, they may be present in a bilayer structure, as micelles, or with a “collapsed” structure. They may also simply be interspersed in a solution, possibly forming aggregates that are not uniform in size or shape. Lipids are fatty substances which may be naturally occurring or synthetic lipids. For example, lipids include the fatty droplets that naturally occur in the cytoplasm as well as the class of compounds which contain long-chain aliphatic hydrocarbons and their derivatives, such as fatty acids, alcohols, amines, amino alcohols, and aldehydes.

[0608] Lipids suitable for use can be obtained from commercial sources. For example, dimyristyl phosphatidylcholine (“DMPC”) can be obtained from Sigma, St. Louis, Mo.; dicetyl phosphate (“DCP”) can be obtained from K & K Laboratories (Plainview, N.Y.); cholesterol (“Choi”) can be obtained from Calbiochem-Behring; dimyristyl phosphatidylglycerol (“DMPG”) and other lipids may be obtained from Avanti Polar Lipids, Inc. (Birmingham, Ala.). Stock solutions of lipids in chloroform or chloroform/methanol can be stored at about −20° C. Chloroform is used as the only solvent since it is more readily evaporated than methanol. “Liposome” is a generic term encompassing a variety of single and multilamellar lipid vehicles formed by the generation of enclosed lipid bilayers or aggregates. Liposomes can be characterized as having vesicular structures with a phospholipid bilayer membrane and an inner aqueous medium. Multilamellar liposomes have multiple lipid layers separated by aqueous medium. They form spontaneously when phospholipids are suspended in an excess of aqueous solution. The lipid components undergo self-rearrangement before the formation of closed structures and entrap water and dissolved solutes between the lipid bilayers (Ghosh et al., 1991 Glycobiology 5: 505-10). However, compositions that have different structures in solution than the normal vesicular structure are also encompassed. For example, the lipids may assume a micellar structure or merely exist as nonuniform aggregates of lipid molecules. Also contemplated are lipofectamine-nucleic acid complexes.

[0609] Regardless of the method used to introduce exogenous nucleic acids into a host cell or otherwise expose a cell to the inhibitor of the present invention, in order to confirm the presence of the recombinant DNA sequence in the host cell, a variety of assays may be performed. Such assays include, for example, “molecular biological” assays well known to those of skill in the art, such as Southern and Northern blotting, RT-PCR and PCR; “biochemical” assays, such as detecting the presence or absence of a particular peptide, e.g., by immunological means (ELISAs and Western blots) or by assays described herein to identify agents falling within the scope of the invention.

[0610] The present invention further provides a vector comprising a CAR encoding nucleic acid molecule. In one aspect, a CAR vector can be directly transduced into a cell, e.g., an immune effector cell, e.g., a T cell or NK cell. In one aspect, the vector is a cloning or expression vector, e.g., a vector including, but not limited to, one or more plasmids (e.g., expression plasmids, cloning vectors, minicircles, minivectors, double minute chromosomes), retroviral and lentiviral vector constructs. In one aspect, the vector is capable of expressing the CAR construct in mammalian immune effector cells, e.g., mammalian T cells or mammalian NK cells. In one aspect, the mammalian T cell is a human T cell.

### Sources of Cells

[0611] Prior to expansion and genetic modification, a source of cells (e.g., immune effector cells, e.g., T cells or NK cells), is obtained from a subject. The term “subject” is intended to include living organisms in which an immune response can be elicited (e.g., mammals). Examples of subjects include humans, dogs, cats, mice, rats, and transgenic species thereof.

[0612] In embodiments, immune effector cells (e.g., a population of immune effector cells), e.g., T cells, are derived from (e.g., differentiated from) a stem cell, e.g., an embryonic stem cell or a pluripotent stem cell, e.g., an induced pluripotent stem cell (iPSC). In embodiments, the cells are autologous or allogeneic. In embodiments wherein the cells are allogeneic, the cells, e.g., derived from stem cells (e.g., iPSCs), are modified to reduce their alloreactivity. For example, the cells can be modified to reduce alloreactivity, e.g., by modifying (e.g., disrupting) their T cell receptor. In embodiments, a site specific nuclease can be used to disrupt the T cell receptor, e.g., after T-cell differentiation. In other examples, cells, e.g., T cells derived from iPSCs, can be generated from virus-specific T cells, which are less likely to cause graft-versus-host disease because of their recognition of a pathogen-derived antigen. In yet other examples, alloreactivity can be reduced, e.g., minimized, by generating iPSCs from common HLA haplotypes such that they are histocompatible with matched, unrelated recipient subjects. In yet other examples, alloreactivity can be reduced, e.g., minimized, by repressing HLA expression through genetic modification. For example, T cells derived from iPSCs can be processed as described in, e.g., Themeli et al. Nat. Biotechnol. 31.10(2013):928-35, incorporated herein by reference. In some examples, immune effector cells, e.g., T cells, derived from stem cells, can be processed/generated using methods described in WO2014/165707, incorporated herein by reference. Additional embodiments pertaining to allogeneic cells are described herein, e.g., in the “Allogeneic CAR Immune Effector Cells” section herein.

[0613] T cells can be obtained from a number of sources, including peripheral blood mononuclear cells, bone marrow, lymph node tissue, cord blood, thymus tissue, tissue from a site of infection, ascites, pleural effusion, spleen tissue, and tumors.

[0614] In certain aspects of the present invention, any number of immune effector cell (e.g., T cell or NK cell) lines available in the art, may be used. In certain aspects of the present invention, T cells can be obtained from a unit of blood collected from a subject using any number of techniques known to the skilled artisan, such as Ficoll™ separation. In one preferred aspect, cells from the circulating blood of an individual are obtained by apheresis. The apheresis product typically contains lymphocytes, including T cells, monocytes, granulocytes, B cells, other nucleated white blood cells, red blood cells, and platelets. In one aspect, the cells collected by apheresis may be washed to remove the plasma fraction and to place the cells in an appropriate buffer or media for subsequent processing steps. In one aspect of the invention, the cells are washed with phosphate buffered saline (PBS). In an alternative aspect, the wash solution lacks calcium and may lack magnesium or may lack many if not all divalent cations. Initial activation steps in the absence of calcium can lead to magnified activation. As those of ordinary skill in the art would readily appreciate a washing step may be accomplished by methods known to those in the art, such as by using a semi-automated “flow-through” centrifuge (for example, the Cobe 2991 cell processor, the Baxter CytoMate, or the Haemonetics Cell Saver 5) according to the manufacturer's instructions. After washing, the cells may be resuspended in a variety of biocompatible buffers, such as, for example, Ca-free, Mg-free PBS, PlasmaLyte A, or other saline solution with or without buffer. Alternatively, the undesirable components of the apheresis sample may be removed and the cells directly resuspended in culture media.

[0615] It is recognized that the methods of the application can utilize culture media conditions comprising 5% or less, for example 2%, human AB serum, and employ known culture media conditions and compositions, for example those described in Smith et al., “Ex vivo expansion of human T cells for adoptive immunotherapy using the novel Xeno-free CTS Immune Cell Serum Replacement” Clinical & Translational Immunology (2015) 4, e31; doi:10.1038/cti.2014.31.

[0616] In one aspect, T cells are isolated from peripheral blood lymphocytes by lysing the red blood cells and depleting the monocytes, for example, by centrifugation through a PERCOLL™ gradient or by counterflow centrifugal elutriation. A specific subpopulation of T cells, such as CD3+, CD28+, CD4+, CD8+, CD45RA+, and CD45RO+T cells, can be further isolated by positive or negative selection techniques. For example, in one aspect, T cells are isolated by incubation with anti-CD3/anti-CD28 (e.g., 3×28)-conjugated beads, such as DYNABEADS® M-450 CD3/CD28 T, for a time period sufficient for positive selection of the desired T cells. In one aspect, the time period is about 30 minutes. In a further aspect, the time period ranges from 30 minutes to 36 hours or longer and all integer values there between. In a further aspect, the time period is at least 1, 2, 3, 4, 5, or 6 hours. In yet another preferred aspect, the time period is 10 to 24 hours. In one aspect, the incubation time period is 24 hours. Longer incubation times may be used to isolate T cells in any situation where there are few T cells as compared to other cell types, such in isolating tumor infiltrating lymphocytes (TIL) from tumor tissue or from immunocompromised individuals. Further, use of longer incubation times can increase the efficiency of capture of CD8+ T cells. Thus, by simply shortening or lengthening the time T cells are allowed to bind to the CD3/CD28 beads and/or by increasing or decreasing the ratio of beads to T cells (as described further herein), subpopulations of T cells can be preferentially selected for or against at culture initiation or at other time points during the process. Additionally, by increasing or decreasing the ratio of anti-CD3 and/or anti-CD28 antibodies on the beads or other surface, subpopulations of T cells can be preferentially selected for or against at culture initiation or at other desired time points. The skilled artisan would recognize that multiple rounds of selection can also be used in the context of this invention. In certain aspects, it may be desirable to perform the selection procedure and use the “unselected” cells in the activation and expansion process. “Unselected” cells can also be subjected to further rounds of selection.

[0617] Enrichment of a T cell population by negative selection can be accomplished with a combination of antibodies directed to surface markers unique to the negatively selected cells. One method is cell sorting and/or selection via negative magnetic immunoadherence or flow cytometry that uses a cocktail of monoclonal antibodies directed to cell surface markers present on the cells negatively selected. For example, to enrich for CD4+ cells by negative selection, a monoclonal antibody cocktail typically includes antibodies to CD14, CD20, CD11b, CD16, HLA-DR, and CD8. In certain aspects, it may be desirable to enrich for or positively select for regulatory T cells which typically express CD4+, CD25+, CD62Lhi, GITR+, and FoxP3+. Alternatively, in certain aspects, T regulatory cells are depleted by anti-C25 conjugated beads or other similar method of selection.

[0618] The methods described herein can include, e.g., selection of a specific subpopulation of immune effector cells, e.g., T cells, that are a T regulatory cell-depleted population, CD25+ depleted cells, using, e.g., a negative selection technique, e.g., described herein. Preferably, the population of T regulatory depleted cells contains less than 30%, 25%, 20%, 15%, 10%, 5%, 4%, 3%, 2%, 1% of CD25+ cells.

[0619] In one embodiment, T regulatory cells, e.g., CD25+ T cells, are removed from the population using an anti-CD25 antibody, or fragment thereof, or a CD25-binding ligand, IL-2. In one embodiment, the anti-CD25 antibody, or fragment thereof, or CD25-binding ligand is conjugated to a substrate, e.g., a bead, or is otherwise coated on a substrate, e.g., a bead. In one embodiment, the anti-CD25 antibody, or fragment thereof, is conjugated to a substrate as described herein.

[0620] In one embodiment, the T regulatory cells, e.g., CD25+ T cells, are removed from the population using CD25 depletion reagent from Miltenyi™. In one embodiment, the ratio of cells to CD25 depletion reagent is 1e7 cells to 20 uL, or 1e7 cells to15 uL, or 1e7 cells to 10 uL, or 1e7 cells to 5 uL, or 1e7 cells to 2.5 uL, or 1e7 cells to 1.25 uL. In one embodiment, e.g., for T regulatory cells, e.g., CD25+ depletion, greater than 500 million cells/ml is used. In a further aspect, a concentration of cells of 600, 700, 800, or 900 million cells/ml is used.

[0621] In one embodiment, the population of immune effector cells to be depleted includes about 6×10⁹ CD25+ T cells. In other aspects, the population of immune effector cells to be depleted include about 1×10⁹ to 1×10¹⁰ CD25+ T cell, and any integer value in between. In one embodiment, the resulting population T regulatory depleted cells has 2×10⁹ T regulatory cells, e.g., CD25+ cells, or less (e.g., 1×10⁹, 5×10⁸, 1×10⁸, 5×10⁷, 1×10⁷, or less CD25+ cells).

[0622] In one embodiment, the T regulatory cells, e.g., CD25+ cells, are removed from the population using the CliniMAC system with a depletion tubing set, such as, e.g., tubing 162-01. In one embodiment, the CliniMAC system is run on a depletion setting such as, e.g., DEPLETION2.1.

[0623] Without wishing to be bound by a particular theory, decreasing the level of negative regulators of immune cells (e.g., decreasing the number of unwanted immune cells, e.g., T_{REG} cells), in a subject prior to apheresis or during manufacturing of a CAR-expressing cell product can reduce the risk of subject relapse. For example, methods of depleting T_{REG} cells are known in the art. Methods of decreasing T_{REG} cells include, but are not limited to, cyclophosphamide, anti-GITR antibody (an anti-GITR antibody described herein), CD25-depletion, and combinations thereof.

[0624] In some embodiments, the manufacturing methods comprise reducing the number of (e.g., depleting) T_{REG} cells prior to manufacturing of the CAR-expressing cell. For example, manufacturing methods comprise contacting the sample, e.g., the apheresis sample, with an anti-GITR antibody and/or an anti-CD25 antibody (or fragment thereof, or a CD25-binding ligand), e.g., to deplete T_{REG} cells prior to manufacturing of the CAR-expressing cell (e.g., T cell, NK cell) product.

[0625] In an embodiment, a subject is pre-treated with one or more therapies that reduce T_{REG} cells prior to collection of cells for CAR-expressing cell product manufacturing, thereby reducing the risk of subject relapse to CAR-expressing cell treatment. In an embodiment, methods of decreasing T_{REG} cells include, but are not limited to, administration to the subject of one or more of cyclophosphamide, anti-GITR antibody, CD25-depletion, or a combination thereof. Administration of one or more of cyclophosphamide, anti-GITR antibody, CD25-depletion, or a combination thereof, can occur before, during or after an infusion of the CAR-expressing cell product.

[0626] In an embodiment, a subject is pre-treated with cyclophosphamide prior to collection of cells for CAR-expressing cell product manufacturing, thereby reducing the risk of subject relapse to CAR-expressing cell treatment. In an embodiment, a subject is pre-treated with an anti-GITR antibody prior to collection of cells for CAR-expressing cell product manufacturing, thereby reducing the risk of subject relapse to CAR-expressing cell treatment.

[0627] In one embodiment, the population of cells to be removed are neither the regulatory T cells or tumor cells, but cells that otherwise negatively affect the expansion and/or function of CART cells, e.g. cells expressing CD14, CD11b, CD33, CD15, or other markers expressed by potentially immune suppressive cells. In one embodiment, such cells are envisioned to be removed concurrently with regulatory T cells and/or tumor cells, or following said depletion, or in another order.

[0628] The methods described herein can include more than one selection step, e.g., more than one depletion step. Enrichment of a T cell population by negative selection can be accomplished, e.g., with a combination of antibodies directed to surface markers unique to the negatively selected cells. One method is cell sorting and/or selection via negative magnetic immunoadherence or flow cytometry that uses a cocktail of monoclonal antibodies directed to cell surface markers present on the cells negatively selected. For example, to enrich for CD4+ cells by negative selection, a monoclonal antibody cocktail can include antibodies to CD14, CD20, CD11b, CD16, HLA-DR, and CD8.

[0629] The methods described herein can further include removing cells from the population which express a tumor antigen, e.g., a tumor antigen that does not comprise CD25, e.g., CD19, CD30, CD38, CD123, CD20, CD14 or CD11b, to thereby provide a population of T regulatory depleted, e.g., CD25+ depleted, and tumor antigen depleted cells that are suitable for expression of a CAR, e.g., a CAR described herein. In one embodiment, tumor antigen expressing cells are removed simultaneously with the T regulatory, e.g., CD25+ cells. For example, an anti-CD25 antibody, or fragment thereof, and an anti-tumor antigen antibody, or fragment thereof, can be attached to the same substrate, e.g., bead, which can be used to remove the cells or an anti-CD25 antibody, or fragment thereof, or the anti-tumor antigen antibody, or fragment thereof, can be attached to separate beads, a mixture of which can be used to remove the cells. In other embodiments, the removal of T regulatory cells, e.g., CD25+ cells, and the removal of the tumor antigen expressing cells is sequential, and can occur, e.g., in either order.

[0630] Also provided are methods that include removing cells from the population which express a check point inhibitor, e.g., a check point inhibitor described herein, e.g., one or more of PD1+ cells, LAG3+ cells, and TIM3+ cells, to thereby provide a population of T regulatory depleted, e.g., CD25+ depleted cells, and check point inhibitor depleted cells, e.g., PD1+, LAG3+ and/or TIM3+ depleted cells. Exemplary check point inhibitors include B7-H1, B7-1, CD160, P1H, 2B4, PD1, TIM3, CEACAM (e.g., CEACAM-1, CEACAM-3 and/or CEACAM-5), LAG3, TIGIT, CTLA-4, BTLA and LAIR1. In one embodiment, check point inhibitor expressing cells are removed simultaneously with the T regulatory, e.g., CD25+ cells. For example, an anti-CD25 antibody, or fragment thereof, and an anti-check point inhibitor antibody, or fragment thereof, can be attached to the same bead which can be used to remove the cells, or an anti-CD25 antibody, or fragment thereof, and the anti-check point inhibitor antibody, or fragment there, can be attached to separate beads, a mixture of which can be used to remove the cells. In other embodiments, the removal of T regulatory cells, e.g., CD25+ cells, and the removal of the check point inhibitor expressing cells is sequential, and can occur, e.g., in either order.

[0631] In one embodiment, a T cell population can be selected that expresses one or more of IFN-γ, TNFα, IL-17A, IL-2, IL-3, IL-4, GM-CSF, IL-10, IL-13, granzyme B, and perforin, or other appropriate molecules, e.g., other cytokines. Methods for screening for cell expression can be determined, e.g., by the methods described in PCT Publication No.: WO 2013/126712.

[0632] For isolation of a desired population of cells by positive or negative selection, the concentration of cells and surface (e.g., particles such as beads) can be varied. In certain aspects, it may be desirable to significantly decrease the volume in which beads and cells are mixed together (e.g., increase the concentration of cells), to ensure maximum contact of cells and beads. For example, in one aspect, a concentration of 2 billion cells/ml is used. In one aspect, a concentration of 1 billion cells/ml is used. In a further aspect, greater than 100 million cells/ml is used. In a further aspect, a concentration of cells of 10, 15, 20, 25, 30, 35, 40, 45, or 50 million cells/ml is used. In yet one aspect, a concentration of cells from 75, 80, 85, 90, 95, or 100 million cells/ml is used. In further aspects, concentrations of 125 or 150 million cells/ml can be used. Using high concentrations can result in increased cell yield, cell activation, and cell expansion. Further, use of high cell concentrations allows more efficient capture of cells that may weakly express target antigens of interest, such as CD28-negative T cells, or from samples where there are many tumor cells present (e.g., leukemic blood, tumor tissue, etc.). Such populations of cells may have therapeutic value and would be desirable to obtain. For example, using high concentration of cells allows more efficient selection of CD8+ T cells that normally have weaker CD28 expression.

[0633] In a related aspect, it may be desirable to use lower concentrations of cells. By significantly diluting the mixture of T cells and surface (e.g., particles such as beads), interactions between the particles and cells is minimized. This selects for cells that express high amounts of desired antigens to be bound to the particles. For example, CD4+ T cells express higher levels of CD28 and are more efficiently captured than CD8+ T cells in dilute concentrations. In one aspect, the concentration of cells used is 5×10e6/ml. In other aspects, the concentration used can be from about 1×10⁵/ml to 1×10⁶/ml, and any integer value in between.

[0634] In other aspects, the cells may be incubated on a rotator for varying lengths of time at varying speeds at either 2-10° C. or at room temperature.

[0635] T cells for stimulation can also be frozen after a washing step. Wishing not to be bound by theory, the freeze and subsequent thaw step provides a more uniform product by removing granulocytes and to some extent monocytes in the cell population. After the washing step that removes plasma and platelets, the cells may be suspended in a freezing solution. While many freezing solutions and parameters are known in the art and will be useful in this context, one method involves using PBS containing 20% DMSO and 8% human serum albumin, or culture media containing 10% Dextran 40 and 5% Dextrose, 20% Human Serum Albumin and 7.5% DMSO, or 31.25% Plasmalyte-A, 31.25% Dextrose 5%, 0.45% NaCl, 10% Dextran 40 and 5% Dextrose, 20% Human Serum Albumin, and 7.5% DMSO or other suitable cell freezing media containing for example, Hespan and PlasmaLyte A, the cells then are frozen to −80° C. at a rate of 1° per minute and stored in the vapor phase of a liquid nitrogen storage tank. Other methods of controlled freezing may be used as well as uncontrolled freezing immediately at −20° C. or in liquid nitrogen.

[0636] In certain aspects, cryopreserved cells are thawed and washed as described herein and allowed to rest for one hour at room temperature prior to activation using the methods of the present invention.

[0637] Also contemplated in the context of the invention is the collection of blood samples or apheresis product from a subject at a time period prior to when the expanded cells as described herein might be needed. As such, the source of the cells to be expanded can be collected at any time point necessary, and desired cells, such as immune effector cells, e.g., T cells or NK cells, isolated and frozen for later use in T cell therapy for any number of diseases or conditions that would benefit from cell therapy, e.g., T cell therapy, such as those described herein. In one aspect a blood sample or an apheresis is taken from a generally healthy subject. In certain aspects, a blood sample or an apheresis is taken from a generally healthy subject who is at risk of developing a disease, but who has not yet developed a disease, and the cells of interest are isolated and frozen for later use. In certain aspects, the immune effector cells, e.g., T cells or NK cells, may be expanded, frozen, and used at a later time. In certain aspects, samples are collected from a patient shortly after diagnosis of a particular disease as described herein but prior to any treatments. In a further aspect, the cells are isolated from a blood sample or an apheresis from a subject prior to any number of relevant treatment modalities, including but not limited to treatment with agents such as natalizumab, efalizumab, antiviral agents, chemotherapy, radiation, immunosuppressive agents, such as cyclosporin, azathioprine, methotrexate, mycophenolate, and FK506, antibodies, or other immunoablative agents such as CAMPATH, anti-CD3 antibodies, cytoxan, fludarabine, cyclosporin, FK506, rapamycin, mycophenolic acid, steroids, FR901228, and irradiation.

[0638] In a further aspect of the present invention, T cells are obtained from a patient directly following treatment that leaves the subject with functional T cells. In this regard, it has been observed that following certain cancer treatments, in particular treatments with drugs that damage the immune system, shortly after treatment during the period when patients would normally be recovering from the treatment, the quality of T cells obtained may be optimal or improved for their ability to expand ex vivo. Likewise, following ex vivo manipulation using the methods described herein, these cells may be in a preferred state for enhanced engraftment and in vivo expansion. Thus, it is contemplated within the context of the present invention to collect blood cells, including T cells, dendritic cells, or other cells of the hematopoietic lineage, during this recovery phase. Further, in certain aspects, mobilization (for example, mobilization with GM-CSF) and conditioning regimens can be used to create a condition in a subject wherein repopulation, recirculation, regeneration, and/or expansion of particular cell types is favored, especially during a defined window of time following therapy. Illustrative cell types include T cells, B cells, dendritic cells, and other cells of the immune system.

[0639] In one embodiment, the immune effector cells expressing a CAR molecule, e.g., a CAR molecule described herein, are obtained from a subject that has received a low, immune enhancing dose of an mTOR inhibitor. In an embodiment, the population of immune effector cells, e.g., T cells, to be engineered to express a CAR, are harvested after a sufficient time, or after sufficient dosing of the low, immune enhancing, dose of an mTOR inhibitor, such that the level of PD1 negative immune effector cells, e.g., T cells, or the ratio of PD1 negative immune effector cells, e.g., T cells/PD1 positive immune effector cells, e.g., T cells, in the subject or harvested from the subject has been, at least transiently, increased.

[0640] In other embodiments, population of immune effector cells, e.g., T cells, which have, or will be engineered to express a CAR, can be treated ex vivo by contact with an amount of an mTOR inhibitor that increases the number of PD1 negative immune effector cells, e.g., T cells or increases the ratio of PD1 negative immune effector cells, e.g., T cells/PD1 positive immune effector cells, e.g., T cells.

[0641] In one embodiment, a T cell population is diaglycerol kinase (DGK)-deficient. DGK-deficient cells include cells that do not express DGK RNA or protein, or have reduced or inhibited DGK activity. DGK-deficient cells can be generated by genetic approaches, e.g., administering RNA-interfering agents, e.g., siRNA, shRNA, miRNA, to reduce or prevent DGK expression. Alternatively, DGK-deficient cells can be generated by treatment with DGK inhibitors described herein.

[0642] In one embodiment, a T cell population is Ikaros-deficient. Ikaros-deficient cells include cells that do not express Ikaros RNA or protein, or have reduced or inhibited Ikaros activity, Ikaros-deficient cells can be generated by genetic approaches, e.g., administering RNA-interfering agents, e.g., siRNA, shRNA, miRNA, to reduce or prevent Ikaros expression. Alternatively, Ikaros-deficient cells can be generated by treatment with Ikaros inhibitors, e.g., lenalidomide.

[0643] In embodiments, a T cell population is DGK-deficient and Ikaros-deficient, e.g., does not express DGK and Ikaros, or has reduced or inhibited DGK and Ikaros activity. Such DGK and Ikaros-deficient cells can be generated by any of the methods described herein.

[0644] In an embodiment, the NK cells are obtained from the subject. In another embodiment, the NK cells are an NK cell line, e.g., NK-92 cell line (Conkwest).

### Allogeneic CAR Immune Effector Cells

[0645] In embodiments described herein, the immune effector cell can be an allogeneic immune effector cell, e.g., T cell or NK cell. For example, the cell can be an allogeneic T cell, e.g., an allogeneic T cell lacking expression of a functional T cell receptor (TCR) and/or human leukocyte antigen (HLA), e.g., HLA class I and/or HLA class II.

[0646] A T cell lacking a functional TCR can be, e.g., engineered such that it does not express any functional TCR on its surface, engineered such that it does not express one or more subunits that comprise a functional TCR (e.g., engineered such that it does not express (or exhibits reduced expression) of TCR alpha, TCR beta, TCR gamma, TCR delta, TCR epsilon, and/or TCR zeta) or engineered such that it produces very little functional TCR on its surface. Alternatively, the T cell can express a substantially impaired TCR, e.g., by expression of mutated or truncated forms of one or more of the subunits of the TCR. The term “substantially impaired TCR” means that this TCR will not elicit an adverse immune reaction in a host.

[0647] A T cell described herein can be, e.g., engineered such that it does not express a functional HLA on its surface. For example, a T cell described herein, can be engineered such that cell surface expression HLA, e.g., HLA class 1 and/or HLA class II, is downregulated. In some aspects, downregulation of HLA may be accomplished by reducing or eliminating expression of beta-2 microglobulin (B2M).

[0648] In some embodiments, the T cell can lack a functional TCR and a functional HLA, e.g., HLA class I and/or HLA class II.

[0649] Modified T cells that lack expression of a functional TCR and/or HLA can be obtained by any suitable means, including a knock out or knock down of one or more subunit of TCR or HLA. For example, the T cell can include a knock down of TCR and/or HLA using siRNA, shRNA, clustered regularly interspaced short palindromic repeats (CRISPR) transcription-activator like effector nuclease (TALEN), or zinc finger endonuclease (ZFN).

[0650] In some embodiments, the allogeneic cell can be a cell which does not expresses or expresses at low levels an inhibitory molecule, e.g. by any mehod described herein. For example, the cell can be a cell that does not express or expresses at low levels an inhibitory molecule, e.g., that can decrease the ability of a CAR-expressing cell to mount an immune effector response. Examples of inhibitory molecules include PD1, PD-L1, PD-L2, CTLA4, TIM3, CEACAM (e.g., CEACAM-1, CEACAM-3 and/or CEACAM-5), LAG3, VISTA, BTLA, TIGIT, LAIR1, CD160, 2B4, CD80, CD86, B7-H3 (CD276), B7-H4 (VTCN1), HVEM (TNFRSF14 or CD270), KIR, A2aR, MHC class I, MHC class II, GAL9, adenosine, and TGF beta. Inhibition of an inhibitory molecule, e.g., by inhibition at the DNA, RNA or protein level, can optimize a CAR-expressing cell performance. In embodiments, an inhibitory nucleic acid, e.g., an inhibitory nucleic acid, e.g., a dsRNA, e.g., an siRNA or shRNA, a clustered regularly interspaced short palindromic repeats (CRISPR), a transcription-activator like effector nuclease (TALEN), or a zinc finger endonuclease (ZFN), e.g., as described herein, can be used.

[0651] siRNA and shRNA to Inhibit TCR or HLA

[0652] In some embodiments, TCR expression and/or HLA expression can be inhibited using siRNA or shRNA that targets a nucleic acid encoding a TCR and/or HLA, and/or an inhibitory molecule described herein (e.g., PD1, PD-L1, PD-L2, CTLA4, TIM3, CEACAM (e.g., CEACAM-1, CEACAM-3 and/or CEACAM-5), LAG3, VISTA, BTLA, TIGIT, LAIR1, CD160, 2B4, CD80, CD86, B7-H3 (CD276), B7-H4 (VTCN1), HVEM (TNFRSF14 or CD270), KIR, A2aR, MHC class I, MHC class II, GAL9, adenosine, and TGF beta), in a cell.

[0653] Expression of siRNA and shRNAs in T cells can be achieved using any conventional expression system, e.g., such as a lentiviral expression system.

[0654] Exemplary shRNAs that downregulate expression of one or more components of the TCR are described, e.g., in US Publication No.: 2012/0321667. Exemplary siRNA and shRNA that downregulate expression of HLA class I and/or HLA class II genes are described, e.g., in U.S. publication No.: US 2007/0036773.

[0655] CRISPR to Inhibit TCR or HLA

[0656] “CRISPR” or “CRISPR to TCR and/or HLA” or “CRISPR to inhibit TCR and/or HLA” as used herein refers to a set of clustered regularly interspaced short palindromic repeats, or a system comprising such a set of repeats. “Cas”, as used herein, refers to a CRISPR-associated protein. A “CRISPR/Cas” system refers to a system derived from CRISPR and Cas which can be used to silence or mutate a TCR and/or HLA gene, and/or an inhibitory molecule described herein (e.g., PD1, PD-L1, PD-L2, CTLA4, TIM3, CEACAM (e.g., CEACAM-1, CEACAM-3 and/or CEACAM-5), LAG3, VISTA, BTLA, TIGIT, LAIR1, CD160, 2B4, CD80, CD86, B7-H3 (CD276), B7-H4 (VTCN1), HVEM (TNFRSF14 or CD270), KIR, A2aR, MHC class I, MHC class II, GALS, adenosine, and TGF beta).

[0657] Naturally-occurring CRISPR/Cas systems are found in approximately 40% of sequenced eubacteria genomes and 90% of sequenced archaea. Grissa et al. (2007) BMC Bioinformatics 8: 172. This system is a type of prokaryotic immune system that confers resistance to foreign genetic elements such as plasmids and phages and provides a form of acquired immunity. Barrangou et al. (2007) Science 315: 1709-1712; Marragini et al. (2008) Science 322: 1843-1845.

[0658] The CRISPR/Cas system has been modified for use in gene editing (silencing, enhancing or changing specific genes) in eukaryotes such as mice or primates. Wiedenheft et al. (2012) Nature 482: 331-8. This is accomplished by introducing into the eukaryotic cell a plasmid containing a specifically designed CRISPR and one or more appropriate Cas.

[0659] The CRISPR sequence, sometimes called a CRISPR locus, comprises alternating repeats and spacers. In a naturally-occurring CRISPR, the spacers usually comprise sequences foreign to the bacterium such as a plasmid or phage sequence; in the TCR and/or HLA CRISPR/Cas system, the spacers are derived from the TCR or HLA gene sequence.

[0660] RNA from the CRISPR locus is constitutively expressed and processed by Cas proteins into small RNAs. These comprise a spacer flanked by a repeat sequence. The RNAs guide other Cas proteins to silence exogenous genetic elements at the RNA or DNA level. Horvath et al. (2010) Science 327: 167-170; Makarova et al. (2006) Biology Direct 1: 7. The spacers thus serve as templates for RNA molecules, analogously to siRNAs. Pennisi (2013) Science 341: 833-836.

[0661] As these naturally occur in many different types of bacteria, the exact arrangements of the CRISPR and structure, function and number of Cas genes and their product differ somewhat from species to species. Haft et al. (2005) PLoS Comput. Biol. 1: e60; Kunin et al. (2007) Genome Biol. 8: R61; Mojica et al. (2005) J. Mol. Evol. 60: 174-182; Bolotin et al. (2005) Microbial. 151: 2551-2561; Pourcel et al. (2005) Microbial. 151: 653-663; and Stern et al. (2010) Trends. Genet. 28: 335-340. For example, the Cse (Cas subtype, E. coli) proteins (e.g., CasA) form a functional complex, Cascade, that processes CRISPR RNA transcripts into spacer-repeat units that Cascade retains. Brouns et al. (2008) Science 321: 960-964. In other prokaryotes, Cas6 processes the CRISPR transcript. The CRISPR-based phage inactivation in E. coli requires Cascade and Cas3, but not Cas1 or Cas2. The Cmr (Cas RAMP module) proteins in Pyrococcus furiosus and other prokaryotes form a functional complex with small CRISPR RNAs that recognizes and cleaves complementary target RNAs. A simpler CRISPR system relies on the protein Cas9, which is a nuclease with two active cutting sites, one for each strand of the double helix. Combining Cas9 and modified CRISPR locus RNA can be used in a system for gene editing. Pennisi (2013) Science 341: 833-836.

[0662] The CRISPR/Cas system can thus be used to edit a TCR and/or HLA gene (adding or deleting a basepair), or introducing a premature stop which thus decreases expression of a TCR and/or HLA. The CRISPR/Cas system can alternatively be used like RNA interference, turning off TCR and/or HLA gene in a reversible fashion. In a mammalian cell, for example, the RNA can guide the Cas protein to a TCR and/or HLA promoter, sterically blocking RNA polymerases.

[0663] Artificial CRISPR/Cas systems can be generated which inhibit TCR and/or HLA, using technology known in the art, e.g., that described in U.S. Publication No. 20140068797 and Cong (2013) Science 339: 819-823. Other artificial CRISPR/Cas systems that are known in the art may also be generated which inhibit TCR and/or HLA, e.g., that described in Tsai (2014) Nature Biotechnol., 32:6 569-576, U.S. Pat. Nos. 8,871,445; 8,865,406; 8,795,965; 8,771,945; and 8,697,359.

[0664] TALEN to Inhibit TCR and/or HLA

[0665] “TALEN” or “TALEN to HLA and/or TCR” or “TALEN to inhibit HLA and/or TCR” refers to a transcription activator-like effector nuclease, an artificial nuclease which can be used to edit the HLA and/or TCR gene, and/or an inhibitory molecule described herein (e.g., PD1, PD-L1, PD-L2, CTLA4, TIM3, CEACAM (e.g., CEACAM-1, CEACAM-3 and/or CEACAM-5), LAG3, VISTA, BTLA, TIGIT, LAIR1, CD160, 2B4, CD80, CD86, B7-H3 (CD276), B7-H4 (VTCN1), HVEM (TNFRSF14 or CD270), KIR, A2aR, MHC class I, MHC class II, GALS, adenosine, and TGF beta).

[0666] TALENs are produced artificially by fusing a TAL effector DNA binding domain to a DNA cleavage domain. Transcription activator-like effects (TALEs) can be engineered to bind any desired DNA sequence, including a portion of the HLA or TCR gene. By combining an engineered TALE with a DNA cleavage domain, a restriction enzyme can be produced which is specific to any desired DNA sequence, including a HLA or TCR sequence. These can then be introduced into a cell, wherein they can be used for genome editing. Boch (2011) Nature Biotech. 29: 135-6; and Boch et al. (2009) Science 326: 1509-12; Moscou et al. (2009) Science 326: 3501.

[0667] TALEs are proteins secreted by Xanthomonas bacteria. The DNA binding domain contains a repeated, highly conserved 33-34 amino acid sequence, with the exception of the 12th and 13th amino acids. These two positions are highly variable, showing a strong correlation with specific nucleotide recognition. They can thus be engineered to bind to a desired DNA sequence.

[0668] To produce a TALEN, a TALE protein is fused to a nuclease (N), which is a wild-type or mutated FokI endonuclease. Several mutations to FokI have been made for its use in TALENs; these, for example, improve cleavage specificity or activity. Cermak et al. (2011) Nucl. Acids Res. 39: e82; Miller et al. (2011) Nature Biotech. 29: 143-8; Hockemeyer et al. (2011) Nature Biotech. 29: 731-734; Wood et al. (2011) Science 333: 307; Doyon et al. (2010) Nature Methods 8: 74-79; Szczepek et al. (2007) Nature Biotech. 25: 786-793; and Guo et al. (2010) J. Mol. Biol. 200: 96.

[0669] The FokI domain functions as a dimer, requiring two constructs with unique DNA binding domains for sites in the target genome with proper orientation and spacing. Both the number of amino acid residues between the TALE DNA binding domain and the FokI cleavage domain and the number of bases between the two individual TALEN binding sites appear to be important parameters for achieving high levels of activity. Miller et al. (2011) Nature Biotech. 29: 143-8.

[0670] A HLA or TCR TALEN can be used inside a cell to produce a double-stranded break (DSB). A mutation can be introduced at the break site if the repair mechanisms improperly repair the break via non-homologous end joining. For example, improper repair may introduce a frame shift mutation. Alternatively, foreign DNA can be introduced into the cell along with the TALEN; depending on the sequences of the foreign DNA and chromosomal sequence, this process can be used to correct a defect in the HLA or TCR gene or introduce such a defect into a wt HLA or TCR gene, thus decreasing expression of HLA or TCR.

[0671] TALENs specific to sequences in HLA or TCR can be constructed using any method known in the art, including various schemes using modular components. Zhang et al. (2011) Nature Biotech. 29: 149-53; Geibler et al. (2011) PLoS ONE 6: e19509.

[0672] Zinc Finger Nuclease to Inhibit HLA and/or TCR

[0673] “ZFN” or “Zinc Finger Nuclease” or “ZFN to HLA and/or TCR” or “ZFN to inhibit HLA and/or TCR” refer to a zinc finger nuclease, an artificial nuclease which can be used to edit the HLA and/or TCR gene, and/or an inhibitory molecule described herein (e.g., PD1, PD-L1, PD-L2, CTLA4, TIM3, CEACAM (e.g., CEACAM-1, CEACAM-3 and/or CEACAM-5), LAGS, VISTA, BTLA, TIGIT, LAIR1, CD160, 2B4, CD80, CD86, B7-H3 (CD276), B7-H4 (VTCN1), HVEM (TNFRSF14 or CD270), KIR, A2aR, MHC class I, MHC class II, GALS, adenosine, and TGF beta).

[0674] Like a TALEN, a ZFN comprises a FokI nuclease domain (or derivative thereof) fused to a DNA-binding domain. In the case of a ZFN, the DNA-binding domain comprises one or more zinc fingers. Carroll et al. (2011) Genetics Society of America 188: 773-782; and Kim et al. (1996) Proc. Natl. Acad. Sci. USA 93: 1156-1160.

[0675] A zinc finger is a small protein structural motif stabilized by one or more zinc ions. A zinc finger can comprise, for example, Cys2His2, and can recognize an approximately 3-bp sequence. Various zinc fingers of known specificity can be combined to produce multi-finger polypeptides which recognize about 6, 9, 12, 15 or 18-bp sequences. Various selection and modular assembly techniques are available to generate zinc fingers (and combinations thereof) recognizing specific sequences, including phage display, yeast one-hybrid systems, bacterial one-hybrid and two-hybrid systems, and mammalian cells.

[0676] Like a TALEN, a ZFN must dimerize to cleave DNA. Thus, a pair of ZFNs are required to target non-palindromic DNA sites. The two individual ZFNs must bind opposite strands of the DNA with their nucleases properly spaced apart. Bitinaite et al. (1998) Proc. Natl. Acad. Sci. USA 95: 10570-5.

[0677] Also like a TALEN, a ZFN can create a double-stranded break in the DNA, which can create a frame-shift mutation if improperly repaired, leading to a decrease in the expression and amount of HLA and/or TCR in a cell. ZFNs can also be used with homologous recombination to mutate in the HLA or TCR gene.

[0678] ZFNs specific to sequences in HLA AND/OR TCR can be constructed using any method known in the art. Cathomen et al. (2008) Mol. Ther. 16: 1200-7; Guo et al. (2010) J. Mol. Biol. 400: 96; U.S. Patent Publication 2011/0158957; and U.S. Patent Publication 2012/0060230.

### Telomerase Expression

[0679] While not wishing to be bound by any particular theory, in some embodiments, a therapeutic T cell has short term persistence in a patient, due to shortened telomeres in the T cell; accordingly, transfection with a telomerase gene can lengthen the telomeres of the T cell and improve persistence of the T cell in the patient. See Carl June, “Adoptive T cell therapy for cancer in the clinic”, Journal of Clinical Investigation, 117:1466-1476 (2007). Thus, in an embodiment, an immune effector cell, e.g., a T cell, ectopically expresses a telomerase subunit, e.g., the catalytic subunit of telomerase, e.g., TERT, e.g., hTERT. In some aspects, this disclosure provides a method of producing a CAR-expressing cell, comprising contacting a cell with a nucleic acid encoding a telomerase subunit, e.g., the catalytic subunit of telomerase, e.g., TERT, e.g., hTERT. The cell may be contacted with the nucleic acid before, simultaneous with, or after being contacted with a construct encoding a CAR.

[0680] In one aspect, the disclosure features a method of making a population of immune effector cells (e.g., T cells, NK cells). In an embodiment, the method comprises: providing a population of immune effector cells (e.g., T cells or NK cells), contacting the population of immune effector cells with a nucleic acid encoding a CAR; and contacting the population of immune effector cells with a nucleic acid encoding a telomerase subunit, e.g., hTERT, under conditions that allow for CAR and telomerase expression.

[0681] In an embodiment, the nucleic acid encoding the telomerase subunit is DNA. In an embodiment, the nucleic acid encoding the telomerase subunit comprises a promoter capable of driving expression of the telomerase subunit.

[0682] In an embodiment, hTERT has the amino acid sequence of GenBank Protein ID AAC51724.1 (Meyerson et al., “hEST2, the Putative Human Telomerase Catalytic Subunit Gene, Is Up-Regulated in Tumor Cells and during Immortalization” Cell Volume 90, Issue 4, 22 Aug. 1997, Pages 785-795) as follows:

(SEQ ID NO: 606)

[sequence omitted]

[0683] In an embodiment, the hTERT has a sequence at least 80%, 85%, 90%, 95%, 96%, 97%, 98%, or 99% identical to the sequence of SEQ ID NO: 606. In an embodiment, the hTERT has a sequence of SEQ ID NO: 606. In an embodiment, the hTERT comprises a deletion (e.g., of no more than 5, 10, 15, 20, or 30 amino acids) at the N-terminus, the C-terminus, or both. In an embodiment, the hTERT comprises a transgenic amino acid sequence (e.g., of no more than 5, 10, 15, 20, or 30 amino acids) at the N-terminus, the C-terminus, or both.

[0684] In an embodiment, the hTERT is encoded by the nucleic acid sequence of GenBank Accession No. AF018167 (Meyerson et al., “hEST2, the Putative Human Telomerase Catalytic Subunit Gene, Is Up-Regulated in Tumor Cells and during Immortalization” Cell Volume 90, Issue 4, 22 Aug. 1997, Pages 785-795):

| (SEQ ID NO: 607) | |
|---|---|
| 1 | caggcagcgt ggtcctgctg cgcacgtggg aagccctggc cccggccacc cccgcgatgc |
| 61 | cgcgcgctcc ccgctgccga gccgtgcgct ccctgctgcg cagccactac cgcgaggtgc |
| 121 | tgccgctggc cacgttcgtg cggcgcctgg ggccccaggg ctggcggctg gtgcagcgcg |
| 181 | gggacccggc ggctttccgc gcgctggtgg cccagtgcct ggtgtgcgtg ccctgggacg |
| 241 | cacggccgcc ccccgccgcc ccctccttcc gccaggtgtc ctgcctgaag gagctggtgg |
| 301 | cccgagtgct gcagaggctg tgcgagcgcg gcgcgaagaa cgtgctggcc ttcggcttcg |
| 361 | cgctgctgga cggggcccgc gggggccccc ccgaggcctt caccaccagc gtgcgcagct |
| 421 | acctgcccaa cacggtgacc gacgcactgc gggggagcgg ggcgtggggg ctgctgttgc |
| 481 | gccgcgtggg cgacgacgtg ctggttcacc tgctggcacg ctgcgcgctc tttgtgctgg |
| 541 | tggctcccag ctgcgcctac caggtgtgcg ggccgccgct gtaccagctc ggcgctgcca |
| 601 | ctcaggcccg gcccccgcca cacgctagtg gaccccgaag gcgtctggga tgcgaacggg |
| 661 | cctggaacca tagcgtcagg gaggccgggg tccccctggg cctgccagcc ccgggtgcga |
| 721 | ggaggcgcgg gggcagtgcc agccgaagtc tgccgttgcc caagaggccc aggcgtggcg |
| 781 | ctgcccctga gccggagcgg acgcccgttg ggcaggggtc ctgggcccac ccgggcagga |
| 841 | cgcgtggacc gagtgaccgt ggtttctgtg tggtgtcacc tgccagaccc gccgaagaag |
| 901 | ccacctcttt ggagggtgcg ctctctggca cgcgccactc ccacccatcc gtgggccgcc |
| 961 | agcaccacgc gggcccccca tccacatcgc ggccaccacg tccctgggac acgccttgtc |
| 1021 | ccccggtgta cgccgagacc aagcacttcc tctactcctc aggcgacaag gagcagctgc |
| 1081 | ggccctcctt cctactcagc tctctgaggc ccagcctgac tggcgctcgg aggctcgtgg |
| 1141 | agaccatctt tctgggttcc aggccctgga tgccagggac tccccgcagg ttgccccgcc |
| 1201 | tgccccagcg ctactggcaa atgcggcccc tgtttctgga gctgcttggg aaccacgcgc |
| 1261 | agtgccccta cggggtgctc ctcaagacgc actgcccgct gcgagctgcg gtcaccccag |
| 1321 | cagccggtgt ctgtgcccgg gagaagcccc agggctctgt ggcggccccc gaggaggagg |
| 1381 | acacagaccc ccgtcgcctg gtgcagctgc tccgccagca cagcagcccc tggcaggtgt |
| 1441 | acggcttcgt gcgggcctgc ctgcgccggc tggtgccccc aggcctctgg ggctccaggc |
| 1501 | acaacgaacg ccgcttcctc aggaacacca agaagttcat ctccctgggg aagcatgcca |
| 1561 | agctctcgct gcaggagctg acgtggaaga tgagcgtgcg gggctgcgct tggctgcgca |
| 1621 | ggagcccagg ggttggctgt gttccggccg cagagcaccg tctgcgtgag gagatcctgg |
| 1681 | ccaagttcct gcactggctg atgagtgtgt acgtcgtcga gctgctcagg tctttctttt |
| 1741 | atgtcacgga gaccacgttt caaaagaaca ggctcttttt ctaccggaag agtgtctgga |
| 1801 | gcaagttgca aagcattgga atcagacagc acttgaagag ggtgcagctg cgggagctgt |
| 1861 | cggaagcaga ggtcaggcag catcgggaag ccaggcccgc cctgctgacg tccagactcc |
| 1921 | gcttcatccc caagcctgac gggctgcggc cgattgtgaa catggactac gtcgtgggag |
| 1981 | ccagaacgtt ccgcagagaa aagagggccg agcgtctcac ctcgagggtg aaggcactgt |
| 2041 | tcagcgtgct caactacgag cgggcgcggc gccccggcct cctgggcgcc tctgtgctgg |
| 2101 | gcctggacga tatccacagg gcctggcgca ccttcgtgct gcgtgtgcgg gcccaggacc |
| 2161 | cgccgcctga gctgtacttt gtcaaggtgg atgtgacggg cgcgtacgac accatccccc |
| 2221 | aggacaggct cacggaggtc atcgccagca tcatcaaacc ccagaacacg tactgcgtgc |
| 2281 | gtcggtatgc cgtggtccag aaggccgccc atgggcacgt ccgcaaggcc ttcaagagcc |
| 2341 | acgtctctac cttgacagac ctccagccgt acatgcgaca gttcgtggct cacctgcagg |
| 2401 | agaccagccc gctgagggat gccgtcgtca tcgagcagag ctcctccctg aatgaggcca |
| 2461 | gcagtggcct cttcgacgtc ttcctacgct tcatgtgcca ccacgccgtg cgcatcaggg |
| 2521 | gcaagtccta cgtccagtgc caggggatcc cgcagggctc catcctctcc acgctgctct |
| 2581 | gcagcctgtg ctacggcgac atggagaaca agctgtttgc ggggattcgg cgggacgggc |
| 2641 | tgctcctgcg tttggtggat gatttcttgt tggtgacacc tcacctcacc cacgcgaaaa |
| 2701 | ccttcctcag gaccctggtc cgaggtgtcc ctgagtatgg ctgcgtggtg aacttgcgga |
| 2761 | agacagtggt gaacttccct gtagaagacg aggccctggg tggcacggct tttgttcaga |
| 2821 | tgccggccca cggcctattc ccctggtgcg gcctgctgct ggatacccgg accctggagg |
| 2881 | tgcagagcga ctactccagc tatgcccgga cctccatcag agccagtctc accttcaacc |
| 2941 | gcggcttcaa ggctgggagg aacatgcgtc gcaaactctt tggggtcttg cggctgaagt |
| 3001 | gtcacagcct gtttctggat ttgcaggtga acagcctcca gacggtgtgc accaacatct |
| 3061 | acaagatcct cctgctgcag gcgtacaggt ttcacgcatg tgtgctgcag ctcccatttc |
| 3121 | atcagcaagt ttggaagaac cccacatttt tcctgcgcgt catctctgac acggcctccc |
| 3181 | tctgctactc catcctgaaa gccaagaacg cagggatgtc gctgggggcc aagggcgccg |
| 3241 | ccggccctct gccctccgag gccgtgcagt ggctgtgcca ccaagcattc ctgctcaagc |
| 3301 | tgactcgaca ccgtgtcacc tacgtgccac tcctggggtc actcaggaca gcccagacgc |
| 3361 | agctgagtcg gaagctcccg gggacgacgc tgactgccct ggaggccgca gccaacccgg |
| 3421 | cactgccctc agacttcaag accatcctgg actgatggcc acccgcccac agccaggccg |
| 3481 | agagcagaca ccagcagccc tgtcacgccg ggctctacgt cccagggagg gaggggcggc |
| 3541 | ccacacccag gcccgcaccg ctgggagtct gaggcctgag tgagtgtttg gccgaggcct |
| 3601 | gcatgtccgg ctgaaggctg agtgtccggc tgaggcctga gcgagtgtcc agccaagggc |
| 3661 | tgagtgtcca gcacacctgc cgtcttcact tccccacagg ctggcgctcg gctccacccc |
| 3721 | agggccagct tttcctcacc aggagcccgg cttccactcc ccacatagga atagtccatc |
| 3781 | cccagattcg ccattgttca cccctcgccc tgccctcctt tgccttccac ccccaccatc |
| 3841 | caggtggaga ccctgagaag gaccctggga gctctgggaa tttggagtga ccaaaggtgt |
| 3901 | gccctgtaca caggcgagga ccctgcacct ggatgggggt ccctgtgggt caaattgggg |
| 3961 | ggaggtgctg tgggagtaaa atactgaata tatgagtttt tcagttttga aaaaaaaaaa |
| 4021 | aaaaaaa |

[0685] In an embodiment, the hTERT is encoded by a nucleic acid having a sequence at least 80%, 85%, 90%, 95%, 96, 97%, 98%, or 99% identical to the sequence of SEQ ID NO: 607. In an embodiment, the hTERT is encoded by a nucleic acid of SEQ ID NO: 607.

### Activation and Expansion of Cells

[0686] Cells may be activated and expanded generally using methods as described, for example, in U.S. Pat. Nos. 6,352,694; 6,534,055; 6,905,680; 6,692,964; 5,858,358; 6,887,466; 6,905,681; 7,144,575; 7,067,318; 7,172,869; 7,232,566; 7,175,843; 5,883,223; 6,905,874; 6,797,514; 6,867,041; and U.S. Patent Application Publication No. 20060121005.

[0687] Generally, the T cells of the invention may be expanded by contact with a surface having attached thereto an agent that stimulates a CD3/TCR complex associated signal and a ligand that stimulates a costimulatory molecule on the surface of the T cells. In particular, T cell populations may be stimulated as described herein, such as by contact with an anti-CD3 antibody, or antigen-binding fragment thereof, or an anti-CD2 antibody immobilized on a surface, or by contact with a protein kinase C activator (e.g., bryostatin) in conjunction with a calcium ionophore. For co-stimulation of an accessory molecule on the surface of the T cells, a ligand that binds the accessory molecule is used. For example, a population of T cells can be contacted with an anti-CD3 antibody and an anti-CD28 antibody, under conditions appropriate for stimulating proliferation of the T cells. To stimulate proliferation of either CD4+ T cells or CD8+ T cells, an anti-CD3 antibody and an anti-CD28 antibody can be used. Examples of an anti-CD28 antibody include 9.3, B-T3, XR-CD28 (Diaclone, Besancon, France) can be used as can other methods commonly known in the art (Berg et al., Transplant Proc. 30(8):3975-3977, 1998; Haanen et al., J. Exp. Med. 190(9):13191328, 1999; Garland et al., J. Immunol Meth. 227(1-2):53-63, 1999).

[0688] In certain aspects, the primary stimulatory signal and the costimulatory signal for the T cell may be provided by different protocols. For example, the agents providing each signal may be in solution or coupled to a surface. When coupled to a surface, the agents may be coupled to the same surface (i.e., in “cis” formation) or to separate surfaces (i.e., in “trans” formation). Alternatively, one agent may be coupled to a surface and the other agent in solution. In one aspect, the agent providing the costimulatory signal is bound to a cell surface and the agent providing the primary activation signal is in solution or coupled to a surface. In certain aspects, both agents can be in solution. In one aspect, the agents may be in soluble form, and then cross-linked to a surface, such as a cell expressing Fc receptors or an antibody or other binding agent which will bind to the agents. In this regard, see for example, U.S. Patent Application Publication Nos. 20040101519 and 20060034810 for artificial antigen presenting cells (aAPCs) that are contemplated for use in activating and expanding T cells in the present invention.

[0689] In one aspect, the two agents are immobilized on beads, either on the same bead, i.e., “cis,” or to separate beads, i.e., “trans.” By way of example, the agent providing the primary activation signal is an anti-CD3 antibody or an antigen-binding fragment thereof and the agent providing the costimulatory signal is an anti-CD28 antibody or antigen-binding fragment thereof; and both agents are co-immobilized to the same bead in equivalent molecular amounts. In one aspect, a 1:1 ratio of each antibody bound to the beads for CD4+ T cell expansion and T cell growth is used. In certain aspects of the present invention, a ratio of anti CD3:CD28 antibodies bound to the beads is used such that an increase in T cell expansion is observed as compared to the expansion observed using a ratio of 1:1. In one particular aspect an increase of from about 1 to about 3 fold is observed as compared to the expansion observed using a ratio of 1:1. In one aspect, the ratio of CD3:CD28 antibody bound to the beads ranges from 100:1 to 1:100 and all integer values there between. In one aspect of the present invention, more anti-CD28 antibody is bound to the particles than anti-CD3 antibody, i.e., the ratio of CD3:CD28 is less than one. In certain aspects of the invention, the ratio of anti CD28 antibody to anti CD3 antibody bound to the beads is greater than 2:1. In one particular aspect, a 1:100 CD3:CD28 ratio of antibody bound to beads is used. In one aspect, a 1:75 CD3:CD28 ratio of antibody bound to beads is used. In a further aspect, a 1:50 CD3:CD28 ratio of antibody bound to beads is used. In one aspect, a 1:30 CD3:CD28 ratio of antibody bound to beads is used. In one preferred aspect, a 1:10 CD3:CD28 ratio of antibody bound to beads is used. In one aspect, a 1:3 CD3:CD28 ratio of antibody bound to the beads is used. In yet one aspect, a 3:1 CD3:CD28 ratio of antibody bound to the beads is used.

[0690] Ratios of particles to cells from 1:500 to 500:1 and any integer values in between may be used to stimulate T cells or other target cells. As those of ordinary skill in the art can readily appreciate, the ratio of particles to cells may depend on particle size relative to the target cell. For example, small sized beads could only bind a few cells, while larger beads could bind many. In certain aspects the ratio of cells to particles ranges from 1:100 to 100:1 and any integer values in-between and in further aspects the ratio comprises 1:9 to 9:1 and any integer values in between, can also be used to stimulate T cells. The ratio of anti-CD3- and anti-CD28-coupled particles to T cells that result in T cell stimulation can vary as noted above, however certain preferred values include 1:100, 1:50, 1:40, 1:30, 1:20, 1:10, 1:9, 1:8, 1:7, 1:6, 1:5, 1:4, 1:3, 1:2, 1:1, 2:1, 3:1, 4:1, 5:1, 6:1, 7:1, 8:1, 9:1, 10:1, and 15:1 with one preferred ratio being at least 1:1 particles per T cell. In one aspect, a ratio of particles to cells of 1:1 or less is used. In one particular aspect, a preferred particle: cell ratio is 1:5. In further aspects, the ratio of particles to cells can be varied depending on the day of stimulation. For example, in one aspect, the ratio of particles to cells is from 1:1 to 10:1 on the first day and additional particles are added to the cells every day or every other day thereafter for up to 10 days, at final ratios of from 1:1 to 1:10 (based on cell counts on the day of addition). In one particular aspect, the ratio of particles to cells is 1:1 on the first day of stimulation and adjusted to 1:5 on the third and fifth days of stimulation. In one aspect, particles are added on a daily or every other day basis to a final ratio of 1:1 on the first day, and 1:5 on the third and fifth days of stimulation. In one aspect, the ratio of particles to cells is 2:1 on the first day of stimulation and adjusted to 1:10 on the third and fifth days of stimulation. In one aspect, particles are added on a daily or every other day basis to a final ratio of 1:1 on the first day, and 1:10 on the third and fifth days of stimulation. One of skill in the art will appreciate that a variety of other ratios may be suitable for use in the present invention. In particular, ratios will vary depending on particle size and on cell size and type. In one aspect, the most typical ratios for use are in the neighborhood of 1:1, 2:1 and 3:1 on the first day.

[0691] In further aspects of the present invention, the cells, such as T cells, are combined with agent-coated beads, the beads and the cells are subsequently separated, and then the cells are cultured. In an alternative aspect, prior to culture, the agent-coated beads and cells are not separated but are cultured together. In a further aspect, the beads and cells are first concentrated by application of a force, such as a magnetic force, resulting in increased ligation of cell surface markers, thereby inducing cell stimulation.

[0692] By way of example, cell surface proteins may be ligated by allowing paramagnetic beads to which anti-CD3 and anti-CD28 are attached (3×28 beads) to contact the T cells. In one aspect the cells (for example, 10⁴ to 10⁹ T cells) and beads (for example, DYNABEADS® M-450 CD3/CD28 T paramagnetic beads at a ratio of 1:1) are combined in a buffer, for example PBS (without divalent cations such as, calcium and magnesium). Again, those of ordinary skill in the art can readily appreciate any cell concentration may be used. For example, the target cell may be very rare in the sample and comprise only 0.01% of the sample or the entire sample (i.e., 100%) may comprise the target cell of interest. Accordingly, any cell number is within the context of the present invention. In certain aspects, it may be desirable to significantly decrease the volume in which particles and cells are mixed together (i.e., increase the concentration of cells), to ensure maximum contact of cells and particles. For example, in one aspect, a concentration of about 10 billion cells/ml, 9 billion/ml, 8 billion/ml, 7 billion/ml, 6 billion/ml, 5 billion/ml, or 2 billion cells/ml is used. In one aspect, greater than 100 million cells/ml is used. In a further aspect, a concentration of cells of 10, 15, 20, 25, 30, 35, 40, 45, or 50 million cells/ml is used. In yet one aspect, a concentration of cells from 75, 80, 85, 90, 95, or 100 million cells/ml is used. In further aspects, concentrations of 125 or 150 million cells/ml can be used. Using high concentrations can result in increased cell yield, cell activation, and cell expansion. Further, use of high cell concentrations allows more efficient capture of cells that may weakly express target antigens of interest, such as CD28-negative T cells. Such populations of cells may have therapeutic value and would be desirable to obtain in certain aspects. For example, using high concentration of cells allows more efficient selection of CD8+ T cells that normally have weaker CD28 expression.

[0693] In one embodiment, cells transduced with a nucleic acid encoding a CAR, e.g., a CAR described herein, are expanded, e.g., by a method described herein. In one embodiment, the cells are expanded in culture for a period of several hours (e.g., about 2, 3, 4, 5, 6, 7, 8, 9, 10, 15, 18, 21 hours) to about 14 days (e.g., 1, 2, 3, 4, 5, 6, 7, 8, 9, 10, 11, 12, 13 or 14 days). In one embodiment, the cells are expanded for a period of 4 to 9 days. In one embodiment, the cells are expanded for a period of 8 days or less, e.g., 7, 6 or 5 days. In one embodiment, the cells, e.g., a CD123 CAR cell described herein or a CD19 CAR cell described herein, are expanded in culture for 5 days, and the resulting cells are more potent than the same cells expanded in culture for 9 days under the same culture conditions. Potency can be defined, e.g., by various T cell functions, e.g. proliferation, target cell killing, cytokine production, activation, migration, or combinations thereof. In one embodiment, the cells, e.g., a CD123 CAR cell described herein or a CD19 CAR cell described herein, expanded for 5 days show at least a one, two, three or four fold increase in cells doublings upon antigen stimulation as compared to the same cells expanded in culture for 9 days under the same culture conditions. In one embodiment, the cells, e.g., the cells expressing a CD123 CAR described herein or a CD19 CAR cell described herein, are expanded in culture for 5 days, and the resulting cells exhibit higher proinflammatory cytokine production, e.g., IFN-γ and/or GM-CSF levels, as compared to the same cells expanded in culture for 9 days under the same culture conditions. In one embodiment, the cells, e.g., a CD123 CAR cell described herein or a CD19 CAR cell described herein, expanded for 5 days show at least a one, two, three, four, five, ten fold or more increase in pg/ml of proinflammatory cytokine production, e.g., IFN-γ and/or GM-CSF levels, as compared to the same cells expanded in culture for 9 days under the same culture conditions.

[0694] In one aspect of the present invention, the mixture may be cultured for several hours (about 3 hours) to about 14 days or any hourly integer value in between. In one aspect, the mixture may be cultured for 21 days. In one aspect of the invention the beads and the T cells are cultured together for about eight days. In one aspect, the beads and T cells are cultured together for 2-3 days. Several cycles of stimulation may also be desired such that culture time of T cells can be 60 days or more. Conditions appropriate for T cell culture include an appropriate media (e.g., Minimal Essential Media or RPMI Media 1640 or, X-vivo 15, (Lonza)) that may contain factors necessary for proliferation and viability, including serum (e.g., fetal bovine or human serum), interleukin-2 (IL-2), insulin, IFN-γ, IL-4, IL-7, GM-CSF, IL-10, IL-12, IL-15, TGFβ, and TNF-α or any other additives for the growth of cells known to the skilled artisan. Other additives for the growth of cells include, but are not limited to, surfactant, plasmanate, and reducing agents such as N-acetyl-cysteine and 2-mercaptoethanol. Media can include RPMI 1640, AIM-V, DMEM, MEM, α-MEM, F-12, X-Vivo 15, and X-Vivo 20, Optimizer, with added amino acids, sodium pyruvate, and vitamins, either serum-free or supplemented with an appropriate amount of serum (or plasma) or a defined set of hormones, and/or an amount of cytokine(s) sufficient for the growth and expansion of T cells. Antibiotics, e.g., penicillin and streptomycin, are included only in experimental cultures, not in cultures of cells that are to be infused into a subject. The target cells are maintained under conditions necessary to support growth, for example, an appropriate temperature (e.g., 37° C.) and atmosphere (e.g., air plus 5% CO₂).

[0695] In one embodiment, the cells are expanded in an appropriate media (e.g., media described herein) that includes one or more interleukin that result in at least a 200-fold (e.g., 200-fold, 250-fold, 300-fold, 350-fold) increase in cells over a 14 day expansion period, e.g., as measured by a method described herein such as flow cytometry. In one embodiment, the cells are expanded in the presence of IL-15 and/or IL-7 (e.g., IL-15 and IL-7).

[0696] In embodiments, methods described herein, e.g., CAR-expressing cell manufacturing methods, comprise removing T regulatory cells, e.g., CD25+ T cells, from a cell population, e.g., using an anti-CD25 antibody, or fragment thereof, or a CD25-binding ligand, IL-2. Methods of removing T regulatory cells, e.g., CD25+ T cells, from a cell population are described herein. In embodiments, the methods, e.g., manufacturing methods, further comprise contacting a cell population (e.g., a cell population in which T regulatory cells, such as CD25+ T cells, have been depleted; or a cell population that has previously contacted an anti-CD25 antibody, fragment thereof, or CD25-binding ligand) with IL-15 and/or IL-7. For example, the cell population (e.g., that has previously contacted an anti-CD25 antibody, fragment thereof, or CD25-binding ligand) is expanded in the presence of IL-15 and/or IL-7.

[0697] In some embodiments a CAR-expressing cell described herein is contacted with a composition comprising a interleukin-15 (IL-15) polypeptide, a interleukin-15 receptor alpha (IL-15Ra) polypeptide, or a combination of both a IL-15 polypeptide and a IL-15Ra polypeptide e.g., hetIL-15, during the manufacturing of the CAR-expressing cell, e.g., ex vivo. In embodiments, a CAR-expressing cell described herein is contacted with a composition comprising a IL-15 polypeptide during the manufacturing of the CAR-expressing cell, e.g., ex vivo. In embodiments, a CAR-expressing cell described herein is contacted with a composition comprising a combination of both a IL-15 polypeptide and a IL-15 Ra polypeptide during the manufacturing of the CAR-expressing cell, e.g., ex vivo. In embodiments, a CAR-expressing cell described herein is contacted with a composition comprising hetIL-15 during the manufacturing of the CAR-expressing cell, e.g., ex vivo.

[0698] In one embodiment the CAR-expressing cell described herein is contacted with a composition comprising hetIL-15 during ex vivo expansion. In an embodiment, the CAR-expressing cell described herein is contacted with a composition comprising an IL-15 polypeptide during ex vivo expansion. In an embodiment, the CAR-expressing cell described herein is contacted with a composition comprising both an IL-15 polypeptide and an IL-15Ra polypeptide during ex vivo expansion. In one embodiment the contacting results in the survival and proliferation of a lymphocyte subpopulation, e.g., CD8+ T cells.

[0699] T cells that have been exposed to varied stimulation times may exhibit different characteristics. For example, typical blood or apheresed peripheral blood mononuclear cell products have a helper T cell population (TH, CD4+) that is greater than the cytotoxic or suppressor T cell population (TC, CD8+). Ex vivo expansion of T cells by stimulating CD3 and CD28 receptors produces a population of T cells that prior to about days 8-9 consists predominately of TH cells, while after about days 8-9, the population of T cells comprises an increasingly greater population of TC cells. Accordingly, depending on the purpose of treatment, infusing a subject with a T cell population comprising predominately of TH cells may be advantageous. Similarly, if an antigen-specific subset of TC cells has been isolated it may be beneficial to expand this subset to a greater degree.

[0700] Further, in addition to CD4 and CD8 markers, other phenotypic markers vary significantly, but in large part, reproducibly during the course of the cell expansion process. Thus, such reproducibility enables the ability to tailor an activated T cell product for specific purposes.

[0701] Once a CAR (e.g., CAR described herein, e.g., CD123 CAR or CD19 CAR) is constructed, various assays can be used to evaluate the activity of the molecule, such as but not limited to, the ability to expand T cells following antigen stimulation, sustain T cell expansion in the absence of re-stimulation, and anti-cancer activities in appropriate in vitro and animal models. Assays to evaluate the effects of a CAR (e.g., CAR described herein, e.g., CD123 CAR or CD19 CAR) are described in further detail below.

[0702] Western blot analysis of CAR expression in primary T cells can be used to detect the presence of monomers and dimers. See, e.g., Milone et al., Molecular Therapy 17(8): 1453-1464 (2009). Very briefly, T cells (1:1 mixture of CD4⁺ and CD8⁺ T cells) expressing the CARs are expanded in vitro for more than 10 days followed by lysis and SDS-PAGE under reducing conditions. CARs containing the full length TCR-t cytoplasmic domain and the endogenous TCR-t chain are detected by western blotting using an antibody to the TCR-t chain. The same T cell subsets are used for SDS-PAGE analysis under non-reducing conditions to permit evaluation of covalent dimer formation.

[0703] In vitro expansion of CAR⁺ T cells following antigen stimulation can be measured by flow cytometry. For example, a mixture of CD4⁺ and CD8⁺ T cells are stimulated with αCD3/αCD28 aAPCs followed by transduction with lentiviral vectors expressing GFP under the control of the promoters to be analyzed. Exemplary promoters include the CMV IE gene, EF-1α, ubiquitin C, or phosphoglycerokinase (PGK) promoters. GFP fluorescence is evaluated on day 6 of culture in the CD4⁺ and/or CD8⁺ T cell subsets by flow cytometry. See, e.g., Milone et al., Molecular Therapy 17(8): 1453-1464 (2009). Alternatively, a mixture of CD4⁺ and CD8⁺ T cells are stimulated with αCD3/αCD28 coated magnetic beads on day 0, and transduced with CAR on day 1 using a bicistronic lentiviral vector expressing CAR along with eGFP using a 2A ribosomal skipping sequence. Cultures are re-stimulated with either CD19⁺ K562 cells (K562-CD19), wild-type K562 cells (K562 wild type) or K562 cells expressing hCD32 and 4-1BBL in the presence of antiCD3 and anti-CD28 antibody (K562-BBL-3/28) following washing. Exogenous IL-2 is added to the cultures every other day at 100 IU/ml. GFP T cells are enumerated by flow cytometry using bead-based counting. See, e.g., Milone et al., Molecular Therapy 17(8): 1453-1464 (2009). Similar assays can be performed using T cells that recognize other antigens (e.g., anti-CD123 T cells) (see, e.g. Gill et al Blood 2014; 123:2343) or with CART cells against other antigens (e.g., anti-CD123 CAR T cells).

[0704] Sustained CAR⁺ T cell expansion in the absence of re-stimulation can also be measured. See, e.g., Milone et al., Molecular Therapy 17(8): 1453-1464 (2009). Briefly, mean T cell volume (fl) is measured on day 8 of culture using a Coulter Multisizer III particle counter, a Nexcelom Cellometer Vision or Millipore Scepter, following stimulation with αCD3/αCD28 coated magnetic beads on day 0, and transduction with the indicated CAR on day 1.

[0705] Animal models can also be used to measure a CART activity. For example, xenograft model using human CD19-specific CAR⁺ T cells to treat a primary human pre-B ALL in immunodeficient mice can be used. See, e.g., Milone et al., Molecular Therapy 17(8): 1453-1464 (2009). Very briefly, after establishment of ALL, mice are randomized as to treatment groups. Different numbers of αCD19-ζ and αCD19-BB-ζ engineered T cells are coinjected at a 1:1 ratio into NOD-SCID-γ^{-/-} mice bearing B-ALL. The number of copies of αCD19-ζ and αCD19-BB-ζ vector in spleen DNA from mice is evaluated at various times following T cell injection. Animals are assessed for leukemia at weekly intervals. Peripheral blood CD19⁺ B-ALL blast cell counts are measured in mice that are injected with αCD19-ζ CAR⁺ T cells or mock-transduced T cells. Survival curves for the groups are compared using the log-rank test. In addition, absolute peripheral blood CD4⁺ and CD8⁺ T cell counts 4 weeks following T cell injection in NOD-SCID-γ^{-/-} mice can also be analyzed. Mice are injected with leukemic cells and 3 weeks later are injected with T cells engineered to express CAR by a bicistronic lentiviral vector that encodes the CAR linked to eGFP. T cells are normalized to 45-50% input GFP⁺ T cells by mixing with mock-transduced cells prior to injection, and confirmed by flow cytometry. Animals are assessed for leukemia at 1-week intervals. Survival curves for the CAR⁺ T cell groups are compared using the log-rank test. Similar experiments can be done with other CARTs, e.g., CD123 CARTs.

[0706] Dose dependent CAR treatment response can be evaluated. See, e.g., Milone et al., Molecular Therapy 17(8): 1453-1464 (2009). For example, peripheral blood is obtained 35-70 days after establishing leukemia in mice injected on day 21 with CAR T cells, an equivalent number of mock-transduced T cells, or no T cells. Mice from each group are randomly bled for determination of peripheral blood CD19⁺ ALL blast counts and then killed on days 35 and 49. The remaining animals are evaluated on days 57 and 70. Similar experiments can be done with other CARTs, e.g., CD123 CARTs.

[0707] Assessment of cell proliferation and cytokine production has been previously described, e.g., at Milone et al., Molecular Therapy 17(8): 1453-1464 (2009). Briefly, assessment of CAR-mediated proliferation is performed in microtiter plates by mixing washed T cells with K562 cells expressing CD19 (K19) or CD32 and CD137 (KT32-BBL) for a final T-cell:K562 ratio of 2:1. K562 cells are irradiated with gamma-radiation prior to use. Anti-CD3 (clone OKT3) and anti-CD28 (clone 9.3) monoclonal antibodies are added to cultures with KT32-BBL cells to serve as a positive control for stimulating T-cell proliferation since these signals support long-term CD8⁺ T cell expansion ex vivo. T cells are enumerated in cultures using CountBright™ fluorescent beads (Invitrogen, Carlsbad, Calif.) and flow cytometry as described by the manufacturer. CAR⁺ T cells are identified by GFP expression using T cells that are engineered with eGFP-2A linked CAR-expressing lentiviral vectors. For CAR+ T cells not expressing GFP, the CAR+ T cells are detected with biotinylated recombinant antigen (e.g., CD123 protein or CD19 protein) and a secondary avidin-PE conjugate. CD4+ and CD8⁺ expression on T cells are also simultaneously detected with specific monoclonal antibodies (BD Biosciences). Cytokine measurements are performed on supernatants collected 24 hours following re-stimulation using the human TH1/TH2 cytokine cytometric bead array kit (BD Biosciences, San Diego, Calif.) according the manufacturer's instructions or using a Luminex 30-plex kit (Invitrogen). Fluorescence is assessed using a BD Fortessa flow cytometer, and data is analyzed according to the manufacturer's instructions. Similar experiments can be done with other CARTs, e.g., CD123 CARTs.

[0708] Cytotoxicity can be assessed by a standard 51Cr-release assay. See, e.g., Milone et al., Molecular Therapy 17(8): 1453-1464 (2009). Briefly, target cells (K562 lines and primary pro-B-ALL cells) are loaded with 51Cr (as NaCrO₄, New England Nuclear, Boston, Mass.) at 37° C. for 2 hours with frequent agitation, washed twice in complete RPMI and plated into microtiter plates. Effector T cells are mixed with target cells in the wells in complete RPMI at varying ratios of effector cell:target cell (E:T). Additional wells containing media only (spontaneous release, SR) or a 1% solution of triton-X 100 detergent (total release, TR) are also prepared. After 4 hours of incubation at 37° C., supernatant from each well is harvested. Released 51Cr is then measured using a gamma particle counter (Packard Instrument Co., Waltham, Mass.). Each condition is performed in at least triplicate, and the percentage of lysis is calculated using the formula: % Lysis=(ER−SR)/(TR−SR), where ER represents the average 51Cr released for each experimental condition.

[0709] Imaging technologies can be used to evaluate specific trafficking and proliferation of CARs in tumor-bearing animal models. Such assays have been described, for example, in Barrett et al., Human Gene Therapy 22:1575-1586 (2011). Briefly, NOD/SCID/γc^{-/-} (NSG) mice are injected IV with Nalm-6 cells followed 7 days later with T cells 4 hour after electroporation with the CAR constructs. The T cells are stably transfected with a lentiviral construct to express firefly luciferase, and mice are imaged for bioluminescence. Alternatively, therapeutic efficacy and specificity of a single injection of CAR⁺ T cells in Nalm-6 xenograft model can be measured as the following: NSG mice are injected with Nalm-6 transduced to stably express firefly luciferase, followed by a single tail-vein injection of T cells electroporated with a CAR (e.g., CD123 CAR or CD19 CAR) 7 days later. Animals are imaged at various time points post injection. For example, photon-density heat maps of firefly luciferasepositive leukemia in representative mice at day 5 (2 days before treatment) and day 8 (24 hr post CAR⁺ PBLs) can be generated.

[0710] Other assays, including those described in the Example section of US2016/0068601A1 (incorporated herein by reference) as well as those that are known in the art can also be used to evaluate the CAR (e.g., CD123 CAR or CD19 CAR) constructs described herein.

[0711] Alternatively, or in combination to the methods disclosed herein, methods and compositions for one or more of: detection and/or quantification of CAR-expressing cells (e.g., in vitro or in vivo (e.g., clinical monitoring)); immune cell expansion and/or activation; and/or CAR-specific selection, that involve the use of a CAR ligand, are disclosed. In one exemplary embodiment, the CAR ligand is an antibody that binds to the CAR molecule, e.g., binds to the extracellular antigen binding domain of CAR (e.g., an antibody that binds to the antigen binding domain, e.g., an anti-idiotypic antibody; or an antibody that binds to a constant region of the extracellular binding domain). In other embodiments, the CAR ligand is a CAR antigen molecule (e.g., a CAR antigen molecule as described herein).

[0712] In one aspect, a method for detecting and/or quantifying CAR-expressing cells is disclosed. For example, the CAR ligand can be used to detect and/or quantify CAR-expressing cells in vitro or in vivo (e.g., clinical monitoring of CAR-expressing cells in a patient, or dosing a patient). The method includes:

[0713] providing the CAR ligand (optionally, a labelled CAR ligand, e.g., a CAR ligand that includes a tag, a bead, a radioactive or fluorescent label);

[0714] acquiring the CAR-expressing cell (e.g., acquiring a sample containing CAR-expressing cells, such as a manufacturing sample or a clinical sample);

[0715] contacting the CAR-expressing cell with the CAR ligand under conditions where binding occurs, thereby detecting the level (e.g., amount) of the CAR-expressing cells present. Binding of the CAR-expressing cell with the CAR ligand can be detected using standard techniques such as FACS, ELISA and the like.

[0716] In another aspect, a method of expanding and/or activating cells (e.g., immune effector cells) is disclosed. The method includes:

[0717] providing a CAR-expressing cell (e.g., a first CAR-expressing cell or a transiently expressing CAR cell);

[0718] contacting said CAR-expressing cell with a CAR ligand, e.g., a CAR ligand as described herein), under conditions where immune cell expansion and/or proliferation occurs, thereby producing the activated and/or expanded cell population.

[0719] In certain embodiments, the CAR ligand is present on (e.g., is immobilized or attached to a substrate, e.g., a non-naturally occurring substrate). In some embodiments, the substrate is a non-cellular substrate. The non-cellular substrate can be a solid support chosen from, e.g., a plate (e.g., a microtiter plate), a membrane (e.g., a nitrocellulose membrane), a matrix, a chip or a bead. In embodiments, the CAR ligand is present in the substrate (e.g., on the substrate surface). The CAR ligand can be immobilized, attached, or associated covalently or non-covalently (e.g., cross-linked) to the substrate. In one embodiment, the CAR ligand is attached (e.g., covalently attached) to a bead. In the aforesaid embodiments, the immune cell population can be expanded in vitro or ex vivo. The method can further include culturing the population of immune cells in the presence of the ligand of the CAR molecule, e.g., using any of the methods described herein.

[0720] In other embodiments, the method of expanding and/or activating the cells further comprises addition of a second stimulatory molecule, e.g., CD28. For example, the CAR ligand and the second stimulatory molecule can be immobilized to a substrate, e.g., one or more beads, thereby providing increased cell expansion and/or activation.

[0721] In yet another aspect, a method for selecting or enriching for a CAR expressing cell is provided. The method includes contacting the CAR expressing cell with a CAR ligand as described herein; and selecting the cell on the basis of binding of the CAR ligand.

[0722] In yet other embodiments, a method for depleting, reducing and/or killing a CAR expressing cell is provided. The method includes contacting the CAR expressing cell with a CAR ligand as described herein; and targeting the cell on the basis of binding of the CAR ligand, thereby reducing the number, and/or killing, the CAR-expressing cell. In one embodiment, the CAR ligand is coupled to a toxic agent (e.g., a toxin or a cell ablative drug). In another embodiment, the anti-idiotypic antibody can cause effector cell activity, e.g., ADCC or ADC activities.

[0723] Exemplary anti-CAR antibodies that can be used in the methods disclosed herein are described, e.g., in WO 2014/190273 and by Jena et al., “Chimeric Antigen Receptor (CAR)-Specific Monoclonal Antibody to Detect CD19-Specific T cells in Clinical Trials”, PLOS March 2013 8:3 e57838, the contents of which are incorporated by reference. In one embodiment, the anti-idiotypic antibody molecule recognizes an anti-CD19 antibody molecule, e.g., an anti-CD19 scFv. For instance, the anti-idiotypic antibody molecule can compete for binding with the CD19-specific CAR mAb clone no. 136.20.1 described in Jena et al., PLOS March 2013 8:3 e57838; may have the same CDRs (e.g., one or more of, e.g., all of, VH CDR1, VH CDR2, CH CDR3, VL CDR1, VL CDR2, and VL CDR3, using the Kabat definition, the Chothia definition, or a combination of tthe Kabat and Chothia definitions) as the CD19-specific CAR mAb clone no. 136.20.1; may have one or more (e.g., 2) variable regions as the CD19-specific CAR mAb clone no. 136.20.1, or may comprise the CD19-specific CAR mAb clone no. 136.20.1. In some embodiments, the anti-idiotypic antibody was made according to a method described in Jena et al. In another embodiment, the anti-idiotypic antibody molecule is an anti-idiotypic antibody molecule described in WO 2014/190273. In some embodiments, the anti-idiotypic antibody molecule has the same CDRs (e.g., one or more of, e.g., all of, VH CDR1, VH CDR2, CH CDR3, VL CDR1, VL CDR2, and VL CDR3) as an antibody molecule of WO 2014/190273 such as 136.20.1; may have one or more (e.g., 2) variable regions of an antibody molecule of WO 2014/190273, or may comprise an antibody molecule of WO 2014/190273 such as 136.20.1. In other embodiments, the anti-CAR antibody binds to a constant region of the extracellular binding domain of the CAR molecule, e.g., as described in WO 2014/190273. In some embodiments, the anti-CAR antibody binds to a constant region of the extracellular binding domain of the CAR molecule, e.g., a heavy chain constant region (e.g., a CH2-CH3 hinge region) or light chain constant region. For instance, in some embodiments the anti-CAR antibody competes for binding with the 2D3 monoclonal antibody described in WO 2014/190273, has the same CDRs (e.g., one or more of, e.g., all of, VH CDR1, VH CDR2, CH CDR3, VL CDR1, VL CDR2, and VL CDR3) as 2D3, or has one or more (e.g., 2) variable regions of 2D3, or comprises 2D3 as described in WO 2014/190273.

[0724] In some aspects and embodiments, the compositions and methods herein are optimized for a specific subset of T cells, e.g., as described in U.S. Ser. No. 62/031,699 filed Jul. 31, 2014, the contents of which are incorporated herein by reference in their entirety. In some embodiments, the optimized subsets of T cells display an enhanced persistence compared to a control T cell, e.g., a T cell of a different type (e.g., CD8⁺ or CD4⁺) expressing the same construct.

[0725] In some embodiments, a CD4⁺ T cell comprises a CAR described herein, which CAR comprises an intracellular signaling domain suitable for (e.g., optimized for, e.g., leading to enhanced persistence in) a CD4⁺ T cell, e.g., an ICOS domain. In some embodiments, a CD8⁺ T cell comprises a CAR described herein, which CAR comprises an intracellular signaling domain suitable for (e.g., optimized for, e.g., leading to enhanced persistence of) a CD8⁺ T cell, e.g., a 4-1BB domain, a CD28 domain, or another costimulatory domain other than an ICOS domain. In some embodiments, the CAR described herein comprises an antigen binding domain described herein, e.g., a CAR comprising an antigen binding domain that specifically binds an antigen described herein, e.g., CD123, e.g., a CAR of Table 11A or Table 12A.

[0726] In an aspect, described herein is a method of treating a subject, e.g., a subject having cancer. The method includes administering to said subject, an effective amount of:

[0727] 1) a CD4⁺ T cell comprising a CAR (the CAR^{CD4+})

[0728] comprising:

[0729] an antigen binding domain, e.g., an antigen binding domain described herein, e.g., an antigen binding domain that specifically binds an antigen described herein, e.g., CD123, e.g., an antigen-binding domain of Table 11A, Table 12A, or Table 12B;

[0730] a transmembrane domain; and

[0731] an intracellular signaling domain, e.g., a first costimulatory domain, e.g., an ICOS domain; and

[0732] 2) a CD8⁺ T cell comprising a CAR (the CAR^{CD8+}) comprising:

[0733] an antigen binding domain, e.g., an antigen binding domain described herein, e.g., an antigen binding domain that specifically binds an antigen described herein, e.g., CD123, e.g., an antigen-binding domain of Table 11A, Table 12A, or Table 12B;

[0734] a transmembrane domain; and

[0735] an intracellular signaling domain, e.g., a second co stimulatory domain, e.g., a 4-1BB domain, a CD28 domain, or another costimulatory domain other than an ICOS domain;

[0736] wherein the CAR^{CD4+} and the CAR^{CD8+} differ from one another.

[0737] Optionally, the method further includes administering:

[0738] 3) a second CD8+ T cell comprising a CAR (the second CAR^{CD8+}) comprising:

[0739] an antigen binding domain, e.g., an antigen binding domain described herein, e.g., an antigen binding domain that specifically binds an antigen described herein, e.g., CD123, e.g., an antigen-binding domain of Table 11A, Table 12A, or Table 12B 9;

[0740] a transmembrane domain; and

an intracellular signaling domain, wherein the second CAR^{CD8+} comprises an intracellular signaling domain, e.g., a costimulatory signaling domain, not present on the CAR^{CD8+}, and, optionally, does not comprise an ICOS signaling domain.

### Methods and Compositions for Producing CAR-Expressing Cells

[0741] The present disclosure also provides, in certain aspects, a method of making a population of immune effector cells (e.g., T cells or NK cells) that can be engineered to express a CAR (e.g., a CAR described herein), the method comprising: providing a population of immune effector cells; and contacting the immune effector cells with a kinase inhibitor (e.g., a JAK-STAT kinase inhibitor such as ruxolitinib) under conditions sufficient to inhibit a target of the kinase inhibitor (e.g., JAK1, JAK2, JAK3, or TYK2). The method can further comprise contacting, e.g., transducing, the immune effector cells with a nucleic acid encoding a CAR molecule.

[0742] In some aspects, the disclosure provides a method of making a CAR-expressing cell (e.g., a CAR-expressing immune effector cell or population of cells), comprising: contacting the cell or population of cells with a kinase inhibitor, e.g., a JAK-STAT kinase inhibitor such as ruxolitinib; and introducing (e.g., transducing) a nucleic acid encoding a CAR molecule into the cell or population of cells under conditions such that the CAR molecule is expressed.

[0743] In certain embodiments of the methods of producing CAR-expressing cells, the CAR molecule encoded by the nucleic acid is a CAR molecule that binds an antigen described herein, e.g., tumor antigen described herein, e.g., B cell antigen, e.g., CD123. In embodiments, the method further comprises culturing the cell or cells under conditions that allow the cell or at least a sub-population of the cells to express the CAR molecule. In embodiments, the cell is a T cell or NK cell, or the population of cells includes T cells, NK cells, or both. In embodiments, the method comprises contacting the cell or cells with the JAK-STAT kinase inhibitor (e.g., for 10-20, 20-30, 30-40, 40-60, or 60-120 minutes) and subsequently removing most or all of the kinase inhibitor from the cell or cells. In embodiments, the JAK-STAT kinase inhibitor is added after the cell or cells are harvested or before the cell or cells are stimulated. In embodiments, the JAK-STAT kinase inhibitor is a multi-kinase inhibitor, e.g., that inhibits at least one kinase in the JAK-STAT pathway. In embodiments, the JAK-STAT kinase inhibitor is a JAK1 inhibitor, JAK2 inhibitor, JAK3 inhibitor, or TYK2 inhibitor. In embodiments, the JAK-STAT kinase inhibitor is specific for JAK1, JAK2, JAK3, or TYK2. In embodiments, the JAK-STAT kinase inhibitor is ruxolitinib, AG490, AZD1480, tofacitinib (tasocitinib or CP-690550), CYT387, fedratinib, baricitinib (INCB039110), lestaurtinib (CEP701), pacritinib (SB1518), XL019, gandotinib (LY2784544), BMS911543, fedratinib (SAR302503), decemotinib (V-509), INCB39110, GEN1, GEN2, GLPG0634, NS018, and N-(cyanomethyl)-4-[2-(4-morpholinoanilino)pyrimidin-4-yl]benzamide; or a pharmaceutically acceptable salt thereof. In embodiments, the JAK-STAT kinase inhibitor is ruxolitinib.

[0744] In some aspects, the present disclosure also provides a reaction mixture comprising a JAK-STAT kinase inhibitor (e.g., ruxolitinib) and a CAR molecule or a nucleic acid encoding a CAR molecule. In some embodiments, the reaction mixture further comprises a population of immune effector cells.

[0745] In some embodiments, one or more of the immune effector cells expresses the CAR molecule or comprises the nucleic acid encoding the CAR molecule. In some embodiments, the JAK-STAT kinase inhibitor is chosen from ruxolitinib, AG490, AZD1480, tofacitinib (tasocitinib or CP-690550), CYT387, fedratinib, baricitinib (INCB039110), lestaurtinib (CEP701), pacritinib (SB1518), XL019, gandotinib (LY2784544), BMS911543, fedratinib (SAR302503), decemotinib (V-509), INCB39110, GEN1, GEN2, GLPG0634, NS018, and N-(cyanomethyl)-4-[2-(4-morpholinoanilino)pyrimidin-4-yl]benzamide; or a pharmaceutically acceptable salt thereof. In embodiments, the reaction mixture comprises cancer cells, e.g., haematological cancer cells. The cancer cells may be, e.g., cells that were harvested from the subject when the immune effector cells were harvested from the subject.

[0746] In embodiments, a reaction mixture as described herein further comprises a buffer or other reagent, e.g., a PBS containing solution. In embodiments, the reaction mixture further comprises an agent that activates and/or expands to cells of the population, e.g., an agent that stimulates a CD3/TCR complex associated signal and/or a ligand that stimulates a costimulatory molecule on the surface of the cells. In embodiments, the agent is a bead conjugated with anti-CD3 antibody, or a fragment thereof, and/or anti-CD28 antibody, or a fragment thereof. In embodiments, the reaction mixture further comprises one or more factors for proliferation and/or viability, including serum (e.g., fetal bovine or human serum), interleukin-2 (IL-2), insulin, IFN-γ, IL-4, IL-7, GM-CSF, IL-10, IL-12, IL-15, TGFβ, and TNF-α or any other additives for the growth of cells. In embodiments, the reaction mixture further comprises IL-15 and/or IL-7. In embodiments, a plurality of the cells of the population in the reaction mixture comprise a nucleic acid molecule, e.g., a nucleic acid molecule described herein, that comprises a CAR encoding sequence, e.g., a CD123 CAR encoding sequence, e.g., as described herein. In embodiments, a plurality of the cells of the population in the reaction mixture comprise a vector comprising a nucleic acid sequence encoding a CAR, e.g., a CAR described herein, e.g., a CD123 CAR described herein. In embodiments, the vector is a vector described herein, e.g., a vector selected from the group consisting of a DNA, a RNA, a plasmid, a lentivirus vector, adenoviral vector, or a retrovirus vector. In embodiments, the reaction mixture further comprises a cryoprotectant or stabilizer such as, e.g., a saccharide, an oligosaccharide, a polysaccharide and a polyol (e.g., trehalose, mannitol, sorbitol, lactose, sucrose, glucose and dextran), salts and crown ethers. In one embodiment, the cryoprotectant is dextran.

[0747] In some embodiments, the method of making described herein further comprises contacting the population of immune effector cells with a nucleic acid encoding a telomerase subunit, e.g., hTERT. The the nucleic acid encoding the telomerase subunit can be DNA.

[0748] In some embodiments, the method of making discosed herein further comprises culturing the population of immune effector cells in serum comprising 2% hAB serum.

### Therapeutic Application

[0749] In accordance with any method described herein, in embodiments, a subject has a cancer, e.g., hematological cancer or a solid cancer. In embodiments, a composition described herein can be used to treat a cancer described herein. In embodiments, a JAK-STAT inhibitor, e.g., ruxolitinib, is used in combination with a CAR-expressing cell (e.g., CD123 CAR expressing cell) to treat a cancer.

[0750] The present invention provides, among other things, compositions and methods for treating a disease associated with expression of an antigen (e.g., CD123) or condition associated with cells which express the antigen (e.g., CD123) including, e.g., a proliferative disease such as a cancer or malignancy or a precancerous condition such as a myelodysplasia, a myelodysplastic syndrome or a preleukemia; or a noncancer related indication associated with cells which express the antigen (e.g., CD123). In one aspect, a cancer associated with expression of an antigen (e.g., CD123) is a hematological cancer. In one aspect, a hematological cancer includes but is not limited to AML, myelodysplastic syndrome, ALL, chronic myeloid leukemia, blastic plasmacytoid dendritic cell neoplasm, myeloproliferative neoplasms, Hodgkin lymphoma, and the like. In embodiments, disease associated with expression of CD123 expression includes, but are not limited to, e.g., atypical and/or non-classical cancers, malignancies, precancerous conditions or proliferative diseases associated with expression of CD123. Non-cancer related indications associated with expression of an antigen (e.g., CD123) may also be included.

[0751] In one aspect, the invention provides methods for treating a disease associated with expression of antigen (e.g., CD123 expression). In one aspect, the invention provides methods for treating a disease wherein part of the tumor is negative for the antigen (e.g., CD123) and part of the tumor is positive for the antigen (e.g., CD123). For example, the CAR described herein is useful for treating subjects that have undergone treatment for a disease associated with elevated expression of the antigen (e.g., CD123), wherein the subject that has undergone treatment for elevated levels of the antigen (e.g., CD123) exhibits a disease associated with elevated levels of the antigen (e.g., CD123). In embodiments, the CAR is useful for treating subjects that have undergone treatment for a disease associated with expression of the antigen (e.g., CD123), wherein the subject that has undergone treatment related to expression of the antigen (e.g., CD123) exhibits a disease associated with expression of the antigen (e.g., CD123).

[0752] In one aspect, provided herein is a method of inhibiting growth of an antigen-expressing (e.g., CD123-expressing) tumor cell, comprising contacting the tumor cell with a CAR-expressing cell (e.g., CD123 CAR-expressing cell (e.g., CD123 CART or CD123 CAR-expressing NK cell)) such that the CAR-expressing cell is activated in response to the antigen and targets the cancer cell, wherein the growth of the tumor is inhibited. The method can comprise administration of a JAK-STAT inhibitor or BTK inhibitor.

[0753] In one aspect, the invention pertains to a method of treating cancer in a subject. The method comprises administering to the subject a CAR-expressing cell (e.g., CD123 CAR-expressing cell (e.g., CD123 CART or CD123 CAR-expressing NK cell)) described herein such that the cancer is treated in the subject. The cellular therapy is provided in combination with a JAK-STAT inhibitor or BTK inhibitor. An example of a cancer that is treatable by a CD123 CAR-expressing cell (e.g., CD123 CART or CD123 CAR-expressing NK cell) is a cancer associated with expression of CD123. An example of a cancer that is treatable by a CD123 CAR-expressing cell (e.g., CD123 CART or CD123 CAR-expressing NK cell) includes but is not limited to AML, Hodgkin lymphoma, myelodysplastic syndrome, chronic myeloid leukemia and other myeloproliferative neoplasms, or Blastic plasmacytoid dendritic cell neoplasm, and the like.

[0754] The disclosure includes a type of cellular therapy where immune effector cells, e.g., T cells or NK cells, are genetically modified to express a chimeric antigen receptor (CAR) and the CAR-expressing cell (e.g., CD123 CAR-expressing cell (e.g., CD123 CART or CD123 CAR-expressing NK cell)) is infused to a recipient in need thereof. The infused cell is able to kill tumor cells in the recipient. The cellular therapy is provided in combination with a JAK-STAT inhibitor or BTK inhibitor. Unlike antibody therapies, CAR-modified immune effector cells, e.g., the CAR-modified T cells or CAR-modified NK cells) are able to replicate in vivo resulting in long-term persistence that can lead to sustained tumor control. In various aspects, the immune effector cells, e.g., T cells or NK cells, administered to the patient, or their progeny, persist in the patient for at least four months, five months, six months, seven months, eight months, nine months, ten months, eleven months, twelve months, thirteen months, fourteen month, fifteen months, sixteen months, seventeen months, eighteen months, nineteen months, twenty months, twenty-one months, twenty-two months, twenty-three months, two years, three years, four years, or five years after administration of the immune effector cell, e.g., T cell or NK cell, to the patient.

[0755] The invention also includes a type of cellular therapy where immune effector cells, e.g., T cells or NK cells, are modified, e.g., by in vitro transcribed RNA, to transiently express a chimeric antigen receptor (CAR) and the CAR-expressing cell, e.g., CAR T cell or CAR NK cell) is infused to a recipient in need thereof. The cellular therapy is provided in combination with a JAK-STAT inhibitor or BTK inhibitor. The infused cell is able to kill tumor cells in the recipient. Thus, in various aspects, the immune effector cells, e.g., T cells or NK cells, administered to the patient, is present for less than one month, e.g., three weeks, two weeks, one week, after administration of the immune effector cell, e.g., T cell or NK cell, to the patient.

[0756] Without wishing to be bound by any particular theory, the anti-tumor immunity response elicited by the CAR-modified immune effector cells, e.g., T cells or NK cells, may be an active or a passive immune response, or alternatively may be due to a direct vs indirect immune response. In one aspect, the CAR transduced immune effector cells, e.g., T cells or NK cells, exhibit specific proinflammatory cytokine secretion and potent cytolytic activity in response to human cancer cells expressing CD123, resist soluble CD123 inhibition, mediate bystander killing and mediate regression of an established human tumor. For example, antigen-less tumor cells within a heterogeneous field of CD123-expressing tumor may be susceptible to indirect destruction by CD123-redirected immune effector cell, e.g., T cells or NK cells that has previously reacted against adjacent antigen-positive cancer cells.

[0757] In one aspect, the fully-human CAR-modified immune effector cells (e.g., T cells or NK cells) of the invention may be a type of vaccine for ex vivo immunization and/or in vivo therapy in a mammal. In one aspect, the mammal is a human.

[0758] With respect to ex vivo immunization, at least one of the following occurs in vitro prior to administering the cell, e.g., T cell or NK cell, into a mammal: i) expansion of the cells, ii) introducing a nucleic acid encoding a CAR to the cells or iii) cryopreservation of the cells.

[0759] Ex vivo procedures are well known in the art and are discussed more fully below. Briefly, cells are isolated from a mammal (e.g., a human) and genetically modified (i.e., transduced or transfected in vitro) with a vector expressing a CAR disclosed herein. The CAR-modified cell can be administered to a mammalian recipient to provide a therapeutic benefit. The mammalian recipient may be a human and the CAR-modified cell can be autologous with respect to the recipient. Alternatively, the cells can be allogeneic, syngeneic or xenogeneic with respect to the recipient.

[0760] The procedure for ex vivo expansion of hematopoietic stem and progenitor cells is described in U.S. Pat. No. 5,199,942, incorporated herein by reference, can be applied to the cells of the present invention. Other suitable methods are known in the art, therefore the present invention is not limited to any particular method of ex vivo expansion of the cells. Briefly, ex vivo culture and expansion of T cells comprises: (1) collecting CD34+ hematopoietic stem and progenitor cells from a mammal from peripheral blood harvest or bone marrow explants; and (2) expanding such cells ex vivo. In addition to the cellular growth factors described in U.S. Pat. No. 5,199,942, other factors such as flt3-L, IL-1, IL-3 and c-kit ligand, can be used for culturing and expansion of the cells.

[0761] In addition to using a cell-based vaccine in terms of ex vivo immunization, the present invention also provides compositions and methods for in vivo immunization to elicit an immune response directed against an antigen in a patient.

[0762] Generally, the cells activated and expanded as described herein may be utilized in the treatment and prevention of diseases that arise in individuals who are immunocompromised. In particular, the CAR-modified immune effector cells (e.g., T cells or NK cells) of the invention are used in the treatment of diseases, disorders and conditions described herein, e.g., disorders or conditions associated with expression of an antigen described herein, e.g., CD123 or CD19. In certain aspects, the cells of the invention are used in the treatment of patients at risk for developing diseases, disorders and conditions described herein, e.g., disorders or conditions associated with expression of an antigen described herein, e.g., CD123 or CD19. Thus, the present invention provides methods for the treatment or prevention of diseases, disorders and conditions described herein, e.g., disorders or conditions associated with expression of an antigen described herein, e.g., CD123 or CD19, comprising administering to a subject in need thereof, a therapeutically effective amount of the CAR-modified immune effector cells (e.g., T cells or NK cells) described herein in combination with a JAK-STAT inhibitor or a BTK inhibitor.

[0763] In one aspect, the CAR-expressing cells (CART cells or CAR-expressing NK cells) of the inventions may be used to treat a proliferative disease such as a cancer or malignancy or is a precancerous condition such as a myelodysplasia, a myelodysplastic syndrome or a preleukemia. In one aspect, the cancer is a hematological cancer preleukemia, a hyperproliferative disorder, a hyperplasia or a dysplasia, which is characterized by abnormal growth of cells.

[0764] In one aspect, the CAR-expressing cells (CART cells or CAR-expressing NK cells) of the invention are used to treat a cancer, wherein the cancer is a hematological cancer.

[0765] Hematological cancer conditions are the types of cancer such as leukemia and malignant lymphoproliferative conditions that affect blood, bone marrow and the lymphatic system.

[0766] In one aspect, the compositions and CAR-expressing cells (CART cells or CAR-expressing NK cells) of the present invention are particularly useful for treating myeloid leukemias, AML and its subtypes, chronic myeloid leukemia (CML), myelodysplastic syndrome (MDS), myeloproliferative neoplasms (MPN), histiocytic disorders, and mast cell disorders.

[0767] Also provided herein are methods for inhibiting the proliferation of or reducing an antigen-expressing (e.g., CD123-expressing or CD19-expressing) cell population, the methods comprising contacting a population of cells comprising an antigen-expressing (e.g., CD123-expressing or CD19-expressing) cell with a CAR-expressing cell (e.g., CD123 CAR-expressing cell or CD19 CAR-expressing cell) that binds to the antigen-expressing (e.g., CD123-expressing or CD19-expressing) cell. In a specific aspect, the present invention provides methods for inhibiting the proliferation of or reducing the population of cancer cells expressing the antigen (e.g., CD123 or CD19), the methods comprising contacting the antigen-expressing (e.g., CD123-expressing or CD19-expressing) cancer cell population with a CAR-expressing cell (e.g., CD123 CAR-expressing cell or CD19 CAR-expressing cell) that binds to the antigen-expressing (e.g., CD123-expressing or CD19-expressing). In one aspect, the present invention provides methods for inhibiting the proliferation or reducing the population of cancer cells expressing an antigen (e.g., CD123), the methods comprising contacting the antigen-expressing (e.g., CD123-expressing or CD19-expressing) cancer cell population with a CAR-expressing cell (e.g., CD123 CAR-expressing cell or CD19 CAR-expressing cell) that binds to the antigen-expressing cell. In certain aspects, the CAR-expressing cell (e.g., CD123-expressing or CD19-expressing cell) reduces the quantity, number, amount or percentage of cells and/or cancer cells by at least 25%, at least 30%, at least 40%, at least 50%, at least 65%, at least 75%, at least 85%, at least 95%, or at least 99% in a subject with or animal model for myeloid leukemia or another cancer associated with the antigen-expressing cells (e.g., CD123-expressing cells or CD19-expressing cells) relative to a negative control. In one aspect, the subject is a human.

[0768] The present invention also provides methods for preventing, treating and/or managing a disease associated with antigen expressing cell (e.g., CD123-expressing cells or CD19-expressing cells) (e.g., a hematologic cancer or atypical cancer expessing the antigen, e.g., CD123 or CD19), the methods comprising administering to a subject in need a CAR-expressing cell (e.g., CD123 CAR-expressing or CD19 CAR-expressing cell) that binds to the antigen-expressing cell. In one aspect, the subject is a human. Non-limiting examples of disorders associated with various antigens, e.g, CD123-expressing cells, include autoimmune disorders (such as lupus), inflammatory disorders (such as allergies and asthma) and cancers (such as hematological cancers or atypical cancers expessing the antigen e,g., CD123).

[0769] The present invention also provides methods for preventing, treating and/or managing a disease associated with antigen-expressing cells (e.g., CD123-expressing cells or CD19-expressing cells), the methods comprising administering to a subject in need a CAR-expressing cell (e.g., CD123 CAR-expressing cell or CD19 CAR-expressing cell) that binds to the antigen-expressing cell. In one aspect, the subject is a human.

[0770] The present invention provides methods for preventing relapse of cancer associated with antigen-expressing cells (e.g., CD123-expressing or CD19-expressing cells), the methods comprising administering to a subject in need thereof a CAR-expressing cell (e.g., CD123 CAR-expressing cell or CD19 CAR-expressing cell) of the invention that binds to the antigen-expressing cell, in combination with a JAK-STAT inhibitor or BTK inhibitor. In one aspect, the methods comprise administering to the subject in need thereof an effective amount of a CAR-expressing cell (e.g., CD123 CAR-expressing cell or CD19 CAR-expressing cell) described herein that binds to the antigen-expressing cell in combination with an effective amount of another therapy (e.g., JAK-STAT inhibitor or BTK inhibitor).

[0771] Bone Marrow Ablation

[0772] In one aspect, the present invention provides compositions and methods for bone marrow ablation. For example, in one aspect, the invention provides compositions and methods for eradication of at least a portion of existing bone marrow in a subject. It is described herein that, in certain instances, the CART123 cells comprising a CD123 CAR of the present invention eradicates CD123 positive bone marrow myeloid progenitor cells.

[0773] In one aspect, the invention provides a method of bone marrow ablation comprising administering a CAR-expressing cell (e.g., CD123 CART cell or CD123 CAR-expressing NK cell) of the invention to a subject in need of bone marrow ablation, e.g., in combination with a JAK-STAT inhibitor. For example, the present method may be used to eradicate some or all of the existing bone marrow of a subject having a disease or disorder in which bone marrow transplantation or bone marrow reconditioning is a beneficial treatment strategy. In one aspect, the bone marrow ablation method of the invention, comprising the administration of a CAR-expressing cell (e.g., CD123 CART cell or CD123 CAR-expressing NK cell) described elsewhere herein, is performed in a subject prior to bone marrow transplantation. Thus, in one aspect, the method of the invention provides a cellular conditioning regimen prior to bone marrow or stem cell transplantation. In one aspect, bone marrow transplantation comprises transplantation of a stem cell. The bone marrow transplantation may comprise transplantation of autologous or allogeneic cells.

[0774] The present invention provides a method of treating a disease or disorder comprising administering a CAR-expressing cell (e.g., CD123 CART cell or CD123 CAR-expressing NK cell, or a CD19 CART cell or CD19 CAR-expressing NK cell) to eradicate at least a portion of existing bone marrow. The method may be used as at least a portion of a treatment regimen for treating any disease or disorder where bone marrow transplantation is beneficial. That is, the present method may be used in any subject in need of a bone marrow transplant. In one aspect, bone marrow ablation comprising administration of a CAR-expressing cell (e.g., CD123 CART cell or CD123 CAR-expressing NK cell) is useful in the treatment of AML. In certain aspects, bone marrow ablation by way of the present method is useful in treating a hematological cancer, a solid tumor, a hematologic disease, a metabolic disorder, HIV, HTLV, a lysosomal storage disorder, and an immunodeficiency.

[0775] Compositions and methods disclosed herein may be used to eradicate at least a portion of existing bone marrow to treat hematological cancers including, but not limited to, leukemia, lymphoma, myeloma, ALL, AML, CLL, CML, Hodgkin's lymphoma, Non-Hodgkin's lymphoma, and multiple myeloma.

[0776] Compositions and methods disclosed herein may be used to treat hematologic diseases including, but not limited to myelodysplasia, anemia, paroxysmal nocturnal hemoglobinuria, aplastic anemia, acquired pure red cell anemia, Diamon-Blackfan anemia, Fanconi anemia, cytopenia, amegakaryotic thrombocytopenia, myeloproliferative disorders, polycythemia vera, essential thrombocytosis, myelofibrosis, hemoglobinopathies, sickle cell disease, β thalassemia major, among others.

[0777] Compositions and methods disclosed herein may be used to treat lysosomal storage disorders including, but not limited to lipidoses, sphigolipodeses, leukodystrophies, mucopolysaccharidoses, glycoproteinoses, infantile neuronal ceroid lipofuscinosis, Jansky-Bielschowsky disease, Niemann-Pick disease, Gaucher disease, adrenoleukodystrophy, metachromatic leukodystrophy, Krabbe disease, Hurler syndrome, Scheie syndrome, Hurler-Scheie syndrome, hunter syndrome, Sanfilippo syndrome, Morquio syndrome, Maroteaux-Lamy syndrome, Sly syndrome, mucolipidosis, fucolipidosis, aspartylglucosaminuria, alpha-mannosidoses, and Wolman disease.

[0778] Compositions and methods disclosed herein may be used to treat immunodeficiencies including, but not limited to, T-cell deficiencies, combined T-cell and B-cell deficiencies, phagocyte disorders, immune dysregulation diseases, innate immune deficiencies, ataxia telangiectasia, DiGeorge syndrome, severe combined immunodeficiency (SCID), Wiskott-Aldrich syndrome, Kostmann syndrome, Shwachman-Diamond syndrome, Griscelli syndrome, and NF-Kappa-B Essential Modulator (NEMO) deficiency.

[0779] In one aspect, the present invention provides a method of treating cancer comprising bone marrow conditioning, where at least a portion of bone marrow of the subject is eradicated by the CAR-expressing cell (e.g., CD123 CART cell or CD123 CAR-expressing NK cell, or CD19 CART cell or CD19 CAR-expressing NK cell) of the invention. For example, in certain instances, the bone marrow of the subject comprises a malignant precursor cell that can be targeted and eliminated by the activity of the CAR-expressing cell. In one aspect, a bone marrow conditioning therapy comprises administering a bone marrow or stem cell transplant to the subject following the eradication of native bone marrow. In one aspect, the bone marrow reconditioning therapy is combined with one or more other anti-cancer therapies, including, but not limited to anti-tumor CAR therapies, chemotherapy, radiation, and the like.

[0780] In one aspect, eradication of the administered CAR-expressing cell (e.g., CD123 CART cell or CD123 CAR-expressing NK cell, or CD19 CART cell or CD19 CAR-expressing NK cell) may be required prior to infusion of bone marrow or stem cell transplant. Eradication of the CAR-expressing cell may be accomplished using any suitable strategy or treatment, including, but not limited to, use of a suicide gene, limited CAR persistence using RNA encoded CARs, or anti-T cell modalities including antibodies or chemotherapy.

### Hematologic Cancers

[0781] Hematological cancer conditions are the types of cancer such as leukemia, lymphoma and malignant lymphoproliferative conditions that affect blood, bone marrow and the lymphatic system.

[0782] In one embodiment, the hematologic cancer is leukemia. In one embodiment, the cancer is selected from the group consisting of one or more acute leukemias including but not limited to B-cell acute lymphoid leukemia (BALL), T-cell acute lymphoid leukemia (TALL), small lymphocytic leukemia (SLL), acute lymphoid leukemia (ALL); one or more chronic leukemias including but not limited to chronic myelogenous leukemia (CML), chronic lymphocytic leukemia (CLL); additional hematologic cancers or hematologic conditions including, but not limited to mantle cell lymphoma (MCL), B cell prolymphocytic leukemia, blastic plasmacytoid dendritic cell neoplasm, Burkitt's lymphoma, diffuse large B cell lymphoma, follicular lymphoma, hairy cell leukemia, small cell- or a large cell-follicular lymphoma, malignant lymphoproliferative conditions, MALT lymphoma, Marginal zone lymphoma, multiple myeloma, myelodysplasia and myelodysplastic syndrome, non-Hodgkin lymphoma, Hodgkin lymphoma, plasmablastic lymphoma, plasmacytoid dendritic cell neoplasm, Waldenstrom macroglobulinemia, and “preleukemia” which are a diverse collection of hematological conditions united by ineffective production (or dysplasia) of myeloid blood cells.

[0783] Leukemia can be classified as acute leukemia and chronic leukemia. Acute leukemia can be further classified as acute myelogenous leukemia (AML) and acute lymphoid leukemia (ALL). Chronic leukemia includes chronic myelogenous leukemia (CML) and chronic lymphoid leukemia (CLL). Other related conditions include myelodysplastic syndromes (MDS, formerly known as “preleukemia”) which are a diverse collection of hematological conditions united by ineffective production (or dysplasia) of myeloid blood cells and risk of transformation to AML.

[0784] Lymphoma is a group of blood cell tumors that develop from lymphocytes. Exemplary lymphomas include non-Hodgkin lymphoma and Hodgkin lymphoma.

[0785] In an aspect, the invention pertains to a method of treating a mammal having a hematological cancer, comprising administering to the mammal an effective amount of the cells expressing a CAR molecule (e.g., CD123 CAR molecule or a CD19 CAR molecule), e.g., a CAR molecule (e.g., CD123 CAR or CD19 CAR) and a JAK-STAT inhibitor or BTK inhibitor.

[0786] In one aspect, the compositions and CART cells or CAR expressing NK cells of the present invention are particularly useful for treating B cell malignancies, such as non-Hodgkin lymphomas, e.g., DLBCL, Follicular lymphoma, or CLL. In some cases, the compositions and CART cells or CAR expressing NK cells of the present invention are particularly useful for treating AML.

[0787] Non-Hodgkin lymphoma (NHL) is a group of cancers of lymphocytes, formed from either B or T cells. NHLs occur at any age and are often characterized by lymph nodes that are larger than normal, weight loss, and fever. Different types of NHLs are categorized as aggressive (fast-growing) and indolent (slow-growing) types. B-cell non-Hodgkin lymphomas include Burkitt lymphoma, chronic lymphocytic leukemia/small lymphocytic lymphoma (CLL/SLL), diffuse large B-cell lymphoma (DLBCL), follicular lymphoma, immunoblastic large cell lymphoma, precursor B-lymphoblastic lymphoma, and mantle cell lymphoma. Examples of T-cell non-Hodgkin lymphomas include mycosis fungoides, anaplastic large cell lymphoma, and precursor T-lymphoblastic lymphoma. Lymphomas that occur after bone marrow or stem cell transplantation are typically B-cell non-Hodgkin lymphomas. See, e.g., Maloney. NEJM. 366.21(2012):2008-16.

[0788] Diffuse large B-cell lymphoma (DLBCL) is a form of NHL that develops from B cells. DLBCL is an aggressive lymphoma that can arise in lymph nodes or outside of the lymphatic system, e.g., in the gastrointestinal tract, testes, thyroid, skin, breast, bone, or brain. Three variants of cellular morphology are commonly observed in DLBCL: centroblastic, immunoblastic, and anaplastic. Centroblastic morphology is most common and has the appearance of medium-to-large-sized lymphocytes with minimal cytoplasm. There are several subtypes of DLBCL. For example, primary central nervous system lymphoma is a type of DLBCL that only affects the brain is called and is treated differently than DLBCL that affects areas outside of the brain. Another type of DLBCL is primary mediastinal B-cell lymphoma, which often occurs in younger patients and grows rapidly in the chest. Symptoms of DLBCL include a painless rapid swelling in the neck, armpit, or groin, which is caused by enlarged lymph nodes. For some subjects, the swelling may be painful. Other symptoms of DLBCL include night sweats, unexplained fevers, and weight loss. Although most patients with DLBCL are adults, this disease sometimes occurs in children. Treatment for DLBCL includes chemotherapy (e.g., cyclophosphamide, doxorubicin, vincristine, prednisone, etoposide), antibodies (e.g., Rituxan), radiation, or stem cell transplants.

[0789] Follicular lymphoma a type of non-Hodgkin lymphoma and is a lymphoma of follicle center B-cells (centrocytes and centroblasts), which has at least a partially follicular pattern. Follicular lymphoma cells express the B-cell markers CD10, CD19, CD20, and CD22. Follicular lymphoma cells are commonly negative for CD5. Morphologically, a follicular lymphoma tumor is made up of follicles containing a mixture of centrocytes (also called cleaved follicle center cells or small cells) and centroblasts (also called large noncleaved follicle center cells or large cells). The follicles are surrounded by non-malignant cells, mostly T-cells. The follicles contain predominantly centrocytes with a minority of centroblasts. The World Health Organization (WHO) morphologically grades the disease as follows: grade 1 (<5 centroblasts per high-power field (hpf); grade 2 (6-15 centroblasts/hpf); grade 3 (>15 centroblasts/hpf). Grade 3 is further subdivided into the following grades: grade 3A (centrocytes still present); grade 3B (the follicles consist almost entirely of centroblasts). Treatment of follicular lymphoma includes chemotherapy, e.g., alkyating agents, nucleoside analogs, anthracycline-containing regimens, e.g., a combination therapy called CHOP-cyclophosphamide, doxorubicin, vincristine, prednisone/prednisolone, antibodies (e.g., rituximab), radioimmunotherapy, and hematopoietic stem cell transplantation.

[0790] CLL is a B-cell malignancy characterized by neoplastic cell proliferation and accumulation in bone morrow, blood, lymph nodes, and the spleen. The median age at time of diagnosis of CLL is about 65 years. Current treatments include chemotherapy, radiation therapy, biological therapy, or bone marrow transplantation. Sometimes symptoms are treated surgically (e.g., splenectomy removal of enlarged spleen) or by radiation therapy (e.g., de-bulking swollen lymph nodes). Chemotherapeutic agents to treat CLL include, e.g., fludarabine, 2-chlorodeoxyadenosine (cladribine), chlorambucil, vincristine, pentostatin, cyclophosphamide, alemtuzumab (Campath-1H), doxorubicin, and prednisone. Biological therapy for CLL includes antibodies, e.g., alemtuzumab, rituximab, and ofatumumab; as well as tyrosine kinase inhibitor therapies. A number of criteria can be used to classify stage of CLL, e.g., the Rai or Binet system. The Rai system describes CLL has having five stages: stage 0 where only lymphocytosis is present; stage I where lymphadenopathy is present; stage II where splenomegaly, lymphadenopathy, or both are present; stage III where anemia, organomegaly, or both are present (progression is defined by weight loss, fatigue, fever, massive organomegaly, and a rapidly increasing lymphocyte count); and stage IV where anemia, thrombocytopenia, organomegaly, or a combination thereof are present. Under the Binet staging system, there are three categories: stage A where lymphocytosis is present and less than three lymph nodes are enlarged (this stage is inclusive of all Rai stage 0 patients, one-half of Rai stage I patients, and one-third of Rai stage II patients); stage B where three or more lymph nodes are involved; and stage C wherein anemia or thrombocytopenia, or both are present. These classification systems can be combined with measurements of mutation of the immunoglobulin genes to provide a more accurate characterization of the state of the disease. The presence of mutated immunoglobulin genes correlates to improved prognosis.

[0791] In another embodiment, the CAR expressing cells of the present invention are used to treat cancers or leukemias, e.g., with leukemia stem cells. For example, the leukemia stem cells are CD34⁺/CD38⁻ leukemia cells.

[0792] In one aspect, the compositions and CAR-expressing cells (CART cells or CAR-expressing NK cells) of the present invention are particularly useful for treating myeloid leukemias, AML and its subtypes, chronic myeloid leukemia (CML), myelodysplastic syndrome (MDS), myeloproliferative neoplasms (MPN), histiocytic disorders, and mast cell disorders.

[0793] Leukemia can be classified as acute leukemia and chronic leukemia. Acute leukemia can be further classified as acute myelogenous leukemia (AML) and acute lymphoid leukemia (ALL). Chronic leukemia includes chronic myelogenous leukemia (CML) and chronic lymphoid leukemia (CLL). Other related conditions include myelodysplastic syndromes (MDS, formerly known as “preleukemia”) which are a diverse collection of hematological conditions united by ineffective production (or dysplasia) of myeloid blood cells and risk of transformation to AML.

[0794] Lymphoma is a group of blood cell tumors that develop from lymphocytes. Exemplary lymphomas include non-Hodgkin lymphoma and Hodgkin lymphoma.

[0795] In AML, malignant transformation and uncontrolled proliferation of an abnormally differentiated, long-lived myeloid progenitor cell results in high circulating numbers of immature blood forms and replacement of normal marrow by malignant cells. Symptoms include fatigue, pallor, easy bruising and bleeding, fever, and infection; symptoms of leukemic infiltration are present in only about 5% of patients (often as skin manifestations). Examination of peripheral blood smear and bone marrow is diagnostic. Existing treatment includes induction chemotherapy to achieve remission and post-remission chemotherapy (with or without stem cell transplantation) to avoid relapse.

[0796] AML has a number of subtypes that are distinguished from each other by morphology, immunophenotype, and cytochemistry. Five classes are described, based on predominant cell type, including myeloid, myeloid-monocytic, monocytic, erythroid, and megakaryocytic.

[0797] Remission induction rates range from 50 to 85%. Long-term disease-free survival reportedly occurs in 20 to 40% of patients and increases to 40 to 50% in younger patients treated with stem cell transplantation.

[0798] Prognostic factors help determine treatment protocol and intensity; patients with strongly negative prognostic features are usually given more intense forms of therapy, because the potential benefits are thought to justify the increased treatment toxicity. The most important prognostic factor is the leukemia cell karyotype; favorable karyotypes include t(15;17), t(8;21), and inv16 (p13;q22). Negative factors include increasing age, a preceding myelodysplastic phase, secondary leukemia, high WBC count, and absence of Auer rods.

[0799] Initial therapy attempts to induce remission and differs most from ALL in that AML responds to fewer drugs. The basic induction regimen includes cytarabine by continuous IV infusion or high doses for 5 to 7 days; daunorubicin or idarubicin is given IV for 3 days during this time. Some regimens include 6-thioguanine, etoposide, vincristine, and prednisone, but their contribution is unclear. Treatment usually results in significant myelosuppression, with infection or bleeding; there is significant latency before marrow recovery. During this time, meticulous preventive and supportive care is vital.

[0800] Chronic myelogenous (or myeloid) leukemia (CML) is also known as chronic granulocytic leukemia, and is characterized as a cancer of the white blood cells. Common treatment regimens for CML include Bcr-Abl tyrosine kinase inhibitors, imatinib (Gleevec®), dasatinib and nilotinib. Bcr-Abl tyrosine kinase inhibitors are specifically useful for CML patients with the Philadelphia chromosome translocation.

[0801] Myelodysplastic syndromes (MDS) are hematological medical conditions characterized by disorderly and ineffective hematopoiesis, or blood production. Thus, the number and quality of blood-forming cells decline irreversibly. Some patients with MDS can develop severe anemia, while others are asymptomatic. The classification scheme for MDS is known in the art, with criteria designating the ratio or frequency of particular blood cell types, e.g., myeloblasts, monocytes, and red cell precursors. MDS includes refractory anemia, refractory anemia with ring sideroblasts, refractory anemia with excess blasts, refractory anemia with excess blasts in transformation, chronic myelomonocytic leukemia (CML).

[0802] Treatments for MDS vary with the severity of the symptoms. Aggressive forms of treatment for patients experiencing severe symptoms include bone marrow transplants and supportive care with blood product support (e.g., blood transfusions) and hematopoietic growth factors (e.g., erythropoietin). Other agents are frequently used to treat MDS: 5-azacytidine, decitabine, and lenalidomide. In some cases, iron chelators deferoxamine (Desferal®) and deferasirox (Exjade®) may also be administered.

### Solid Cancers

[0803] Exemplary solid cancers include but are not limited to: uterine cancer, colon cancer, ovarian cancer, rectal cancer, skin cancer, stomach cancer, lung cancer, non-small cell carcinoma of the lung, breast cancer, cancer of the small intestine, testicular cancer, cancer of the anal region, cancer of the endocrine system, cancer of the thyroid gland, cancer of the parathyroid gland, rectal cancer, renal-cell carcinoma, liver cancer, cancer of the esophagus, melanoma, cutaneous or intraocular malignant melanoma, uterine cancer, brain cancer, brain stem glioma, pituitary adenoma, Kaposi's sarcoma, cancer of the adrenal gland, bone cancer, pancreatic cancer, cancer of the head or neck, epidermoid cancer, carcinoma of the endometrium, carcinoma of the vagina, cervical cancer, sarcoma, uterine cancer, stomach cancer, esophageal cancer, colorectal cancer, liver cancer, prostate cancer, carcinoma of the cervix squamous cell cancer, carcinoma of the fallopian tubes, sarcoma of soft tissue, cancer of the urethra, carcinoma of the vulva, cancer of the kidney or ureter, carcinoma of the renal pelvis, spinal axis tumor, cancer of the penis, cancer of the bladder, neoplasm of the central nervous system (CNS), primary CNS lymphoma, tumor angiogenesis, metastatic lesions of said cancers, and/or combinations thereof

### B Cell Cancers

[0804] Many patients with B cell malignancies are incurable with standard therapy. In addition, traditional treatment options often have serious side effects. Attempts have been made in cancer immunotherapy, however, several obstacles render this a very difficult goal to achieve clinical effectiveness. Although hundreds of so-called tumor antigens have been identified, these are generally derived from self and thus are poorly immunogenic. Furthermore, tumors use several mechanisms to render themselves hostile to the initiation and propagation of immune attack.

[0805] Recent developments using chimeric antigen receptor (CAR) modified autologous T cell (CART) therapy, which relies on redirecting T cells to a suitable cell-surface molecule on cancer cells such as B cell malignancies, show promising results in harnessing the power of the immune system to treat B cell malignancies and other cancers (see, e.g., Sadelain et al., Cancer Discovery 3:388-398 (2013)). The clinical results of the murine derived CART19 (i.e., “CTL019”) have shown promise in establishing complete remissions in patients suffering with CLL as well as in childhood ALL (see, e.g., Kalos et al., Sci Transl Med 3:95ra73 (2011), Porter et al., NEJM 365:725-733 (2011), Grupp et al., NEJM 368:1509-1518 (2013)). Besides the ability for the chimeric antigen receptor on the genetically modified T cells to recognize and destroy the targeted cells, a successful therapeutic T cell therapy needs to have the ability to proliferate and persist over time, in order to survey for leukemic relapse. The variable quality of T cells, resulting from anergy, suppression, or exhaustion, will have effects on CAR-transformed T cells' performance, over which skilled practitioners have limited control at this time. To be effective, CAR transformed patient T cells need to persist and maintain the ability to proliferate in response to the cognate antigen. It has been shown that ALL patient T cells perform can do this with CART19 comprising a murine scFv (see, e.g., Grupp et al., NEJM 368:1509-1518 (2013)).

[0806] In embodiments, a B cell inhibitor comprises one or more inhibitors of CD10, CD19, CD20, CD22, CD34, CD123, FLT-3, ROR1, CD79b, CD179b, or CD79a.

### Methods of Treating or Preventing CRS

[0807] In yet another aspect, provided herein is a method of treating or preventing CRS associated with administration of a cell, e.g., a population of cells, expressing a CAR in a subject.

[0808] In yet another aspect, provided herein is a method of treating or preventing CRS associated with administration of a T cell inhibitor therapy, e.g., a CD19-inhibiting or depleting therapy, e.g., a therapy that includes a CD19 inhibitor. In embodiments, the CD19-inhibiting or depleting therapy is associated with CRS.

[0809] In some embodiments, the method of treating or preventing CRS comprises administering to the subject a JAK/STAT innibitor, in combination as described herein.

[0810] In other embodiments, the method of treating or preventing CRS comprises administering to the subject a BTK innibitor, in combination as described herein.

[0811] In yet other embodiments, the method of treating or preventing CRS comprises administering to the subject an IL-6 inhibitor (e.g., an anti-IL6 receptor inhibitor, e.g., tocilizumab) prior to, simultaneously with, or within 1 day (e.g, within 24 hours, 12 hours, 6 hours, 5, hours, 4 hours, 3 hours, 2 hours, 1 hour or less) of, administration of a dose (e.g., a first dose) of said cell, e.g., said population of cells, expressing a CAR, or said therapy. In embodiments, the IL-6 inhibitor (e.g., tocilizumab) is administered upon (e.g., within 1 hour, 30 minutes, 20 minutes, 15 minutes or less) a first sign of a symptom of CRS (e.g., a fever, e.g., characterized by a temperature of at least 38° C. (e.g., at least 38.5° C.), e.g., for two successive measurements in 24 hours (e.g., at least 4, 5, 6, 7, 8 hours, or more, apart)) in the subject.

[0812] In other embodiments, the therapy is a CD19-inhibiting or depleting therapy, e.g., a therapy that includes a CD19 inhibitor. In embodiments, the CD19-inhibiting or depleting therapy is associated with CRS. In some embodiments, the CD19 inhibitor is a CD19 antibody, e.g., a CD19 bispecific antibody (e.g., a bispecific T cell engager that targets CD19, e.g., blinatumomab). In some embodiments, the bispecific T cell engager antibody molecule is an antibody molecule described in Bargou et al., “Tumor regression in cancer patients by very low doses of a T cell-engaging antibody.” Science. 2008 Aug. 15; 321(5891):974-7. doi: 10.1126/science.1158545.

[0813] In some embodiments, the therapy includes a CD19 CAR-expressing cell, e.g., a CD19 CART cell, or an anti-CD19 antibody (e.g., an anti-CD19 mono- or bispecific antibody) or a fragment or conjugate thereof. In one embodiment, the anti-CD19 antibody is a humanized antigen binding domain as described in WO2014/153270 (e.g., Table 3 of WO2014/153270) incorporated herein by reference, or a conjugate thereof. Other exemplary anti-CD19 antibodies or fragments or conjugates thereof, include but are not limited to, blinatumomab, SAR3419 (Sanofi), MEDI-551 (Medlmmune LLC), Combotox, DT2219ARL (Masonic Cancer Center), MOR-208 (also called XmAb-5574; MorphoSys), XmAb-5871 (Xencor), MDX-1342 (Bristol-Myers Squibb), SGN-CD19A (Seattle Genetics), and AFM11 (Affimed Therapeutics). See, e.g., Hammer. MAbs. 4.5(2012): 571-77. Blinatomomab is a bispecific antibody comprised of two scFvs—one that binds to CD19 and one that binds to CD3. Blinatomomab directs T cells to attack cancer cells. See, e.g., Hammer et al.; Clinical Trial Identifier No. NCT00274742 and NCT01209286. MEDI-551 is a humanized anti-CD19 antibody with a Fc engineered to have enhanced antibody-dependent cell-mediated cytotoxicity (ADCC). See, e.g., Hammer et al.; and Clinical Trial Identifier No. NCT01957579. Combotox is a mixture of immunotoxins that bind to CD19 and CD22. The immunotoxins are made up of scFv antibody fragments fused to a deglycosylated ricin A chain. See, e.g., Hammer et al.; and Herrera et al. J. Pediatr. Hematol. Oncol. 31.12(2009):936-41; Schindler et al. Br. J. Haematol. 154.4(2011):471-6. DT2219ARL is a bispecific immunotoxin targeting CD19 and CD22, comprising two scFvs and a truncated diphtheria toxin. See, e.g., Hammer et al.; and Clinical Trial Identifier No. NCT00889408. SGN-CD19A is an antibody-drug conjugate (ADC) comprised of an anti-CD19 humanized monoclonal antibody linked to a synthetic cytotoxic cell-killing agent, monomethyl auristatin F (MMAF). See, e.g., Hammer et al.; and Clinical Trial Identifier Nos. NCT01786096 and NCT01786135. SAR3419 is an anti-CD19 antibody-drug conjugate (ADC) comprising an anti-CD19 humanized monoclonal antibody conjugated to a maytansine derivative via a cleavable linker. See, e.g., Younes et al. J. Clin. Oncol. 30.2(2012): 2776-82; Hammer et al.; Clinical Trial Identifier No. NCT00549185; and Blanc et al. Clin Cancer Res. 2011; 17:6448-58. XmAb-5871 is an Fc-engineered, humanized anti-CD19 antibody. See, e.g., Hammer et al. MDX-1342 is a human Fc-engineered anti-CD19 antibody with enhanced ADCC. See, e.g., Hammer et al. In embodiments, the antibody molecule is a bispecific anti-CD19 and anti-CD3 molecule. For instance, AFM11 is a bispecific antibody that targets CD19 and CD3. See, e.g., Hammer et al.; and Clinical Trial Identifier No. NCT02106091. In some embodiments, an anti-CD19 antibody described herein is conjugated or otherwise bound to a therapeutic agent, e.g., a chemotherapeutic agent, peptide vaccine (such as that described in Izumoto et al. 2008 J Neurosurg 108:963-971), immunosuppressive agent, or immunoablative agent, e.g., cyclosporin, azathioprine, methotrexate, mycophenolate, FK506, CAMPATH, anti-CD3 antibody, cytoxin, fludarabine, rapamycin, mycophenolic acid, steroid, FR901228, or cytokine.

### Combination Therapies

[0814] A CAR-expressing cell described herein may be used in combination with a JAK-STAT inhibitor or a BTK inhibitor. The combination of the CAR-expressing cell and the JAK-STAT inhibitor or a BTK inhibitor can be used in further combination with other known agents and therapies (additional therapeutic agent). Administered “in combination”, as used herein, means that two (or more) different treatments are delivered to the subject during the course of the subject's affliction with the disorder, e.g., the two or more treatments are delivered after the subject has been diagnosed with the disorder and before the disorder has been cured or eliminated or treatment has ceased for other reasons. In some embodiments, the delivery of one treatment is still occurring when the delivery of the second begins, so that there is overlap in terms of administration. This is sometimes referred to herein as “simultaneous” or “concurrent delivery”. In other embodiments, the delivery of one treatment ends before the delivery of the other treatment begins. In some embodiments of either case, the treatment is more effective because of combined administration. For example, the second treatment is more effective, e.g., an equivalent effect is seen with less of the second treatment, or the second treatment reduces symptoms to a greater extent, than would be seen if the second treatment were administered in the absence of the first treatment, or the analogous situation is seen with the first treatment. In some embodiments, delivery is such that the reduction in a symptom, or other parameter related to the disorder is greater than what would be observed with one treatment delivered in the absence of the other. The effect of the two treatments can be partially additive, wholly additive, or greater than additive. The delivery can be such that an effect of the first treatment delivered is still detectable when the second is delivered.

[0815] A CAR-expressing cell described herein and the at least one additional therapeutic agent can be administered simultaneously, in the same or in separate compositions, or sequentially. For sequential administration, the CAR-expressing cell described herein can be administered first, and the additional agent can be administered second, or the order of administration can be reversed. The JAK-STAT inhibitor or BTK inhibitor can be administered before, concurrently with, or after the CAR-expressing cell or the additional agent.

[0816] The CAR therapy and/or other therapeutic agents, procedures or modalities can be administered during periods of active disorder, or during a period of remission or less active disease. The CAR therapy can be administered before the other treatment, concurrently with the treatment, post-treatment, or during remission of the disorder.

[0817] When administered in combination, the CAR therapy and the additional agent (e.g., second or third agent), or all, can be administered in an amount or dose that is higher, lower or the same than the amount or dosage of each agent used individually, e.g., as a monotherapy. In certain embodiments, the administered amount or dosage of the CAR therapy, the additional agent (e.g., second or third agent), or all, is lower (e.g., at least 20%, at least 30%, at least 40%, or at least 50%) than the amount or dosage of each agent used individually, e.g., as a monotherapy. In other embodiments, the amount or dosage of the CAR therapy, the additional agent (e.g., second or third agent), or all, that results in a desired effect (e.g., treatment of cancer) is lower (e.g., at least 20%, at least 30%, at least 40%, or at least 50% lower) than the amount or dosage of each agent used individually, e.g., as a monotherapy, required to achieve the same therapeutic effect.

### JAK-STAT Signaling Pathway and Inhibitors

[0818] The JAK-STAT signaling pathway includes a Janus Kinase (JAK) and two Signal

[0819] Transducer and Activator of Transcription (STAT) proteins. See, e.g., Aaronson et al. Science 296.5573(2002):1653-55. The JAK family includes a number of different enzymes, including JAK1, JAK2, JAK3, and TYK2.

[0820] JAK inhibitors have been developed for treating myeloproliferative neoplasms, including ruxolitinib (INCB018424) for treating primary myelofibrosis, fedratinib (SAR302503, TG101348) for treating myelofibrosis, and XL019, SB1518 and AZD1480 for treating post-PV/ET myelofibrosis. See, e.g., Sonbol, Ther. Adv. Hematol. 4: 15-35, 2013. Patients treated with JAK inhibitors have reduced splenomegaly and/or improvement of constitutional symptoms. CYT387 (momelotinib) or N-(cyanomethyl)-4-(2-(4-morpholinophenylamino) pyrimidin-4-yl)benzamide is a JAK inhibitor that is currently in clinical trials for treating primary myelofibrosis, polycythemia vera (PV), essential thrombocythemia (ET), and post-PV/ET.

[0821] Inhibitors of JAK-STAT include a small molecule, an antibody molecule, a polypeptide, e.g., a fusion protein, or an inhibitory nucleic acid, e.g., a siRNA or shRNA.

[0822] Exemplary inhibitors of JAK-STAT include but are not limited to ruxolitinib, AG490, AZD1480, tofacitinib (tasocitinib or CP-690550), CYT387, fedratinib, baricitinib (INCB039110), lestaurtinib (CEP701), pacritinib (SB1518), XL019, gandotinib (LY2784544), BMS911543, fedratinib (SAR302503), decemotinib (V-509), INCB39110, GEN1, GEN2, GLPG0634, NS018, and N-(cyanomethyl)-4-[2-(4-morpholinoanilino)pyrimidin-4-yl]benzamide; or pharmaceutically acceptable salts thereof.

[0823] Ruxolitinib is an ATP mimetic that inhibits both JAK1 and JAK2, lowering inflammatory cytokine levels, e.g., IL-6 and TNF-alpha. See, e.g., Quintas-Cardama A. Blood 115.15(2010):3109-17. Ruxolitinib is used clinically for myelofibrosis treatment. See, e.g., Mascarenhas, J. et al. Clin. Cancer Res. 18(2012):3008-14).

In embodiments, a JAK-STAT inhibitor comprises ruxolitinib, or a pharmaceutically acceptable salt, prodrug, or solvate thereof. In one embodiment, ruxolitinib has the chemical name: (3R)-3-cyclopentyl-3-[4-(7H-pyrrolo[2,3-d]pyrimidin-4-yl)pyrazol-1-yl]propanenitrile).

[0824] In embodiments, an inhibitor of JAK-STAT includes Compound A from WO/2015/109286 (incorporated herein by reference), or a pharmaceutically acceptable salt, prodrug, or solvate thereof.

[0825] In embodiments, the JAK-STAT inhibitor is a prodrug or solvate of one or more of the JAK inhibitors listed herein.

### BTK and Inhibitors

[0826] Bruton's tyrosine kinase (BTK) is a tyrosine protein kinase that is involved in B-cell development. Inhibitors of BTK include a small molecule, an antibody molecule, a polypeptide, e.g., a fusion protein, or an inhibitory nucleic acid, e.g., a siRNA or shRNA.

[0827] In one embodiment, the kinase inhibitor is a BTK inhibitor selected from ibrutinib (PCI-32765); GDC-0834; RN-486; CGI-560; CGI-1764; HM-71224; CC-292; ONO-4059; CNX-774; and LFM-A13. In a preferred embodiment, the BTK inhibitor does not reduce or inhibit the kinase activity of interleukin-2-inducible kinase (ITK), and is selected from GDC-0834; RN-486; CGI-560; CGI-1764; HM-71224; CC-292; ONO-4059; CNX-774; and LFM-A13.

[0828] In one embodiment, the kinase inhibitor is a BTK inhibitor, e.g., ibrutinib (PCI-32765). In embodiments, a CAR-expressing cell described herein is administered to a subject in combination with a BTK inhibitor (e.g., ibrutinib). In embodiments, a CAR-expressing cell described herein is administered to a subject in combination with ibrutinib (also called PCI-32765). In one embodiment, ibrutinib has the chemical name: (1-[(3R)-3-[4-Amino-3-(4-phenoxyphenyl)-1H-pyrazolo[3,4-d]pyrimidin-1-yl]piperidin-1-yl]prop-2-en-1-one).

[0829] In embodiments, the subject has CLL, mantle cell lymphoma (MCL), or small lymphocytic lymphoma (SLL). For example, the subject has a deletion in the short arm of chromosome 17 (del(17p), e.g., in a leukemic cell). In other examples, the subject does not have a del(17p). In embodiments, the subject has relapsed CLL or SLL, e.g., the subject has previously been administered a cancer therapy (e.g., previously been administered one, two, three, or four prior cancer therapies). In embodiments, the subject has refractory CLL or SLL. In other embodiments, the subject has follicular lymphoma, e.g., relapse or refractory follicular lymphoma. In some embodiments, ibrutinib is administered at a dosage of about 300-600 mg/day (e.g., about 300-350, 350-400, 400-450, 450-500, 500-550, or 550-600 mg/day, e.g., about 420 mg/day or about 560 mg/day), e.g., orally. In embodiments, the ibrutinib is administered at a dose of about 250 mg, 300 mg, 350 mg, 400 mg, 420 mg, 440 mg, 460 mg, 480 mg, 500 mg, 520 mg, 540 mg, 560 mg, 580 mg, 600 mg (e.g., 250 mg, 420 mg or 560 mg) daily for a period of time, e.g., daily for 21 day cycle cycle, or daily for 28 day cycle. In one embodiment, 1, 2, 3, 4, 5, 6, 7, 8, 9, 10, 11, 12 or more cycles of ibrutinib are administered. In some embodiments, ibrutinib is administered in combination with rituximab. See, e.g., Burger et al. (2013) Ibrutinib In Combination With Rituximab (iR) Is Well Tolerated and Induces a High Rate Of Durable Remissions In Patients With High-Risk Chronic Lymphocytic Leukemia (CLL): New, Updated Results Of a Phase II Trial In 40 Patients, Abstract 675 presented at 55^{th} ASH Annual Meeting and Exposition, New Orleans, La. 7-10 December Without being bound by theory, it is thought that the addition of ibrutinib enhances the T cell proliferative response and may shift T cells from a T-helper-2 (Th2) to T-helper-1 (Th1) phenotype. Th1 and Th2 are phenotypes of helper T cells, with Th1 versus Th2 directing different immune response pathways. A Th1 phenotype is associated with proinflammatory responses, e.g., for killing cells, such as intracellular pathogens/viruses or cancerous cells, or perpetuating autoimmune responses. A Th2 phenotype is associated with eosinophil accumulation and anti-inflammatory responses.

[0830] In some embodiments of the methods, uses, and compositions herein, the BTK inhibitor is a BTK inhibitor described in International Application WO/2015/079417, which is herein incorporated by reference in its entirety. For instance, in some embodiments, the BTK inhibitor is a compound of formula (I) or a pharmaceutically acceptable salt thereof;

[chemical structure]

[0831] wherein,

[0832] R1 is hydrogen, C1-C6 alkyl optionally substituted by hydroxy;

[0833] R2 is hydrogen or halogen;

[0834] R3 is hydrogen or halogen;

[0835] R4 is hydrogen;

[0836] R5 is hydrogen or halogen;

[0837] or R4 and R5 are attached to each other and stand for a bond, —CH2-, -CH2-CH2-, —CH═CH—, —CH═CH—CH2-; -CH2-CH═CH—; or —CH2-CH2-CH2-;

[0838] R6 and R7 stand independently from each other for H, C1-C6 alkyl optionally substituted by hydroxyl, C3-C6 cycloalkyl optionally substituted by halogen or hydroxy, or halogen;

[0839] R8, R9, R, R′, R10 and R11 independently from each other stand for H, or C1-C6 alkyl optionally substituted by C1-C6 alkoxy; or any two of R8, R9, R, R′, R10 and R11 together with the carbon atom to which they are bound may form a 3-6 membered saturated carbocyclic ring;

[0840] R12 is hydrogen or C1-C6 alkyl optionally substituted by halogen or C1-C6 alkoxy;

[0841] or R12 and any one of R8, R9, R, R′, R10 or R11 together with the atoms to which they are bound may form a 4, 5, 6 or 7 membered azacyclic ring, which ring may optionally be substituted by halogen, cyano, hydroxyl, C1-C6 alkyl or C1-C6 alkoxy;

[0842] n is 0 or 1; and

[0843] R13 is C2-C6 alkenyl optionally substituted by C1-C6 alkyl, C1-C6 alkoxy or N,N-di-C1-C6 alkyl amino; C2-C6 alkynyl optionally substituted by C1-C6 alkyl or C1-C6 alkoxy; or C2-C6 alkylenyl oxide optionally substituted by C1-C6 alkyl.

[0844] In some embodiments, the BTK inhibitor of Formula I is chosen from: N-(3-(5-((1-Acryloylazetidin-3-yl)oxy)-6-aminopyrimidin-4-yl)-5-fluoro-2-methylphenyl)-4-cyclopropyl-2-fluorobenzamide; (E)-N-(3-(6-Amino-5-((1-(but-2-enoyl)azetidin-3-yl)oxy)pyrimidin-4-yl)-5-fluoro-2-methylphenyl)-4-cyclopropyl-2-fluorobenzamide; N-(3-(6-Amino-5-((1-propioloylazetidin-3-yl)oxy)pyrimidin-4-yl)-5-fluoro-2-methylphenyl)-4-cyclopropyl-2-fluorobenzamide; N-(3-(6-Amino-5-((1-(but-2-ynoyl)azetidin-3-yl)oxy)pyrimidin-4-yl)-5-fluoro-2-methylphenyl)-4-cyclopropyl-2-fluorobenzamide; N-(3-(5-((1-Acryloylpiperidin-4-yl)oxy)-6-aminopyrimidin-4-yl)-5-fluoro-2-methylphenyl)-4-cyclopropyl-2-fluorobenzamide; N-(3-(6-Amino-5-(2-(N-methylacrylamido)ethoxy)pyrimidin-4-yl)-5-fluoro-2-methylphenyl)-4-cyclopropyl-2-fluorobenzamide; (E)-N-(3-(6-Amino-5-(2-(N-methylbut-2-enamido)ethoxy)pyrimidin-4-yl)-5-fluoro-2-methylphenyl)-4-cyclopropyl-2-fluorobenzamide; N-(3-(6-Amino-5-(2-(N-methylpropiolamido)ethoxy)pyrimidin-4-yl)-5-fluoro-2-methylphenyl)-4-cyclopropyl-2-fluorobenzamide; (E)-N-(3-(6-Amino-5-(2-(4-methoxy-N-methylbut-2-enamido)ethoxy)pyrimidin-4-yl)-5-fluoro-2-methylphenyl)-4-cyclopropyl-2-fluorobenzamide; N-(3-(6-Amino-5-(2-(N-methylbut-2-ynamido)ethoxy)pyrimidin-4-yl)-5-fluoro-2-methylphenyl)-4-cyclopropyl-2-fluorobenzamide; N-(2-((4-Amino-6-(3-(4-cyclopropyl-2-fluorobenzamido)-5-fluoro-2-methylphenyl)pyrimidin-5-yl)oxy)ethyl)-N-methyloxirane-2-carboxamide; N-(2-((4-Amino-6-(3-(6-cyclopropyl-8-fluoro-1-oxoisoquinolin-2(1H)-yl)phenyl)pyrimidin-5-yl)oxy)ethyl)-N-methylacrylamide; N-(3-(5-(2-Acrylamidoethoxy)-6-aminopyrimidin-4-yl)-5-fluoro-2-methylphenyl)-4-cyclopropyl-2-fluorobenzamide; N-(3-(6-Amino-5-(2-(N-ethylacrylamido)ethoxy)pyrimidin-4-yl)-5-fluoro-2-methylphenyl)-4-cyclopropyl-2-fluorobenzamide; N-(3-(6-Amino-5-(2-(N-(2-fluoroethyl)acrylamido)ethoxy)pyrimidin-4-yl)-5-fluoro-2-methylphenyl)-4-cyclopropyl-2-fluorobenzamide; N-(3-(5-((1-Acrylamidocyclopropyl)methoxy)-6-aminopyrimidin-4-yl)-5-fluoro-2-methylphenyl)-4-cyclopropyl-2-fluorobenzamide; (S)—N-(3-(5-(2-Acrylamidopropoxy)-6-aminopyrimidin-4-yl)-5-fluoro-2-methylphenyl)-4-cyclopropyl-2-fluorobenzamide; (S)—N-(3-(6-Amino-5-(2-(but-2-ynamido)propoxy)pyrimidin-4-yl)-5-fluoro-2-methylphenyl)-4-cyclopropyl-2-fluorobenzamide; (S)—N-(3-(6-Amino-5-(2-(N-methylacrylamido)propoxy)pyrimidin-4-yl)-5-fluoro-2-methylphenyl)-4-cyclopropyl-2-fluorobenzamide; (S)—N-(3-(6-Amino-5-(2-(N-methylbut-2-ynamido)propoxy)pyrimidin-4-yl)-5-fluoro-2-methylphenyl)-4-cyclopropyl-2-fluorobenzamide; N-(3-(6-Amino-5-(3-(N-methylacrylamido)propoxy)pyrimidin-4-yl)-5-fluoro-2-methylphenyl)-4-cyclopropyl-2-fluorobenzamide; (S)—N-(3-(5-((1-Acryloylpyrrolidin-2-yl)methoxy)-6-aminopyrimidin-4-yl)-5-fluoro-2-methylphenyl)-4-cyclopropyl-2-fluorobenzamide; (S)—N-(3-(6-Amino-5-((1-(but-2-ynoyl)pyrrolidin-2-yl)methoxy)pyrimidin-4-yl)-5-fluoro-2-methylphenyl)-4-cyclopropyl-2-fluorobenzamide; (S)-2-(3-(5-((1-Acryloylpyrrolidin-2-yl)methoxy)-6-aminopyrimidin-4-yl)-5-fluoro-2-(hydroxymethyl)phenyl)-6-cyclopropyl-3,4-dihydroisoquinolin-1(2H)-one; N-(2-((4-Amino-6-(3-(6-cyclopropyl-1-oxo-3,4-dihydroisoquinolin-2(1H)-yl)-5-fluoro-2-(hydroxymethyl)phenyl)pyrimidin-5-yl)oxy)ethyl)-N-methylacrylamide; N-(3-(5-(((2S,4R)-1-Acryloyl-4-methoxypyrrolidin-2-yl)methoxy)-6-aminopyrimidin-4-yl)-5-fluoro-2-methylphenyl)-4-cyclopropyl-2-fluorobenzamide; N-(3-(6-Amino-5-(((2S,4R)-1-(but-2-ynoyl)-4-methoxypyrrolidin-2-yl)methoxy)pyrimidin-4-yl)-5-fluoro-2-methylphenyl)-4-cyclopropyl-2-fluorobenzamide; 2-(3-(5-(((2S,4R)-1-Acryloyl-4-methoxypyrrolidin-2-yl)methoxy)-6-aminopyrimidin-4-yl)-5-fluoro-2-(hydroxymethyl)phenyl)-6-cyclopropyl-3,4-dihydroisoquinolin-1(2H)-one; N-(3-(5-(((2S,4S)-1-Acryloyl-4-methoxypyrrolidin-2-yl)methoxy)-6-aminopyrimidin-4-yl)-5-fluoro-2-methylphenyl)-4-cyclopropyl-2-fluorobenzamide; N-(3-(6-Amino-5-(((2S,4S)-1-(but-2-ynoyl)-4-methoxypyrrolidin-2-yl)methoxy)pyrimidin-4-yl)-5-fluoro-2-methylphenyl)-4-cyclopropyl-2-fluorobenzamide; N-(3-(5-(((2S,4R)-1-Acryloyl-4-fluoropyrrolidin-2-yl)methoxy)-6-aminopyrimidin-4-yl)-5-fluoro-2-methylphenyl)-4-cyclopropyl-2-fluorobenzamide; N-(3-(6-Amino-5-(((2S,4R)-1-(but-2-ynoyl)-4-fluoropyrrolidin-2-yl)methoxy)pyrimidin-4-yl)-5-fluoro-2-methylphenyl)-4-cyclopropyl-2-fluorobenzamide; (S)—N-(3-(5-((1-Acryloylazetidin-2-yl)methoxy)-6-aminopyrimidin-4-yl)-5-fluoro-2-methylphenyl)-4-cyclopropyl-2-fluorobenzamide; (S)—N-(3-(6-Amino-5-((1-propioloylazetidin-2-yl)methoxy)pyrimidin-4-yl)-5-fluoro-2-methylphenyl)-4-cyclopropyl-2-fluorobenzamide; (S)-2-(3-(5-((1-Acryloylazetidin-2-yl)methoxy)-6-aminopyrimidin-4-yl)-5-fluoro-2-(hydroxymethyl)phenyl)-6-cyclopropyl-3,4-dihydroisoquinolin-1(2H)-one; (R)—N-(3-(5-((1-Acryloylazetidin-2-yl)methoxy)-6-aminopyrimidin-4-yl)-5-fluoro-2-methylphenyl)-4-cyclopropyl-2-fluorobenzamide; (R)—N-(3-(5-((1-Acryloylpiperidin-3-yl)methoxy)-6-aminopyrimidin-4-yl)-5-fluoro-2-methylphenyl)-4-cyclopropyl-2-fluorobenzamide; N-(3-(5-(((2R,3S)-1-Acryloyl-3-methoxypyrrolidin-2-yl)methoxy)-6-aminopyrimidin-4-yl)-5-fluoro-2-methylphenyl)-4-cyclopropyl-2-fluorobenzamide; N-(3-(5-(((2S,4R)-1-Acryloyl-4-cyanopyrrolidin-2-yl)methoxy)-6-aminopyrimidin-4-yl)-5-fluoro-2-methylphenyl)-4-cyclopropyl-2-fluorobenzamide; or N-(3-(5-(((2S,4S)-1-Acryloyl-4-cyanopyrrolidin-2-yl)methoxy)-6-aminopyrimidin-4-yl)-5-fluoro-2-methylphenyl)-4-cyclopropyl-2-fluorobenzamide.

[0845] Unless otherwise provided, the chemical terms used above in describing the BTK inhibitor of Formula I are used according to their meanings as set out in International Application WO/2015/079417, which is herein incorporated by reference in its entirety.

[0846] Additional examples of BTK inhibitors are described herein, e.g., in the Further Combination Therapies section herein.

### Further Combination Therapies

[0847] In further aspects, a CAR-expressing cell described herein may be used in a treatment regimen in combination with surgery, cytokines, radiation, or chemotherapy such as cytoxan, fludarabine, histone deacetylase inhibitors, demethylating agents, or peptide vaccine, such as that described in Izumoto et al. 2008 J Neurosurg 108:963-971.

[0848] In certain instances, compounds of the present invention are combined with other therapeutic agents, such as other anti-cancer agents, anti-allergic agents, anti-nausea agents (or anti-emetics), pain relievers, cytoprotective agents, and combinations thereof.

[0849] In one embodiment, a CAR-expressing cell and/or the STAT/JAK inhibitor or BTK inhibitor described herein can be used further in combination with a chemotherapeutic agent. Exemplary chemotherapeutic agents include an anthracycline (e.g., doxorubicin (e.g., liposomal doxorubicin)). a vinca alkaloid (e.g., vinblastine, vincristine, vindesine, vinorelbine), an alkylating agent (e.g., cyclophosphamide, decarbazine, melphalan, ifosfamide, temozolomide), an immune cell antibody (e.g., alemtuzamab, gemtuzumab, rituximab, ofatumumab, tositumomab, brentuximab), an antimetabolite (including, e.g., folic acid antagonists, pyrimidine analogs, purine analogs and adenosine deaminase inhibitors (e.g., fludarabine)), an mTOR inhibitor, a TNFR glucocorticoid induced TNFR related protein (GITR) agonist, a proteasome inhibitor (e.g., aclacinomycin A, gliotoxin or bortezomib), an immunomodulator such as thalidomide or a thalidomide derivative (e.g., lenalidomide).

[0850] General Chemotherapeutic agents considered for use in combination therapies include anastrozole (Arimidex®), bicalutamide (Casodex®), bleomycin sulfate (Blenoxane®), busulfan (Myleran®), busulfan injection (Busulfex®), capecitabine (Xeloda®), N4-pentoxycarbonyl-5-deoxy-5-fluorocytidine, carboplatin (Paraplatin®), carmustine (BiCNU®), chlorambucil (Leukeran®), cisplatin (Platinol®), cladribine (Leustatin®), cyclophosphamide (Cytoxan® or Neosar®), cytarabine, cytosine arabinoside (Cytosar-U®), cytarabine liposome injection (DepoCyt®), dacarbazine (DTIC-Dome®), dactinomycin (Actinomycin D, Cosmegan), daunorubicin hydrochloride (Cerubidine®), daunorubicin citrate liposome injection (DaunoXome®), dexamethasone, docetaxel (Taxotere®), doxorubicin hydrochloride (Adriamycin®, Rubex®), etoposide (Vepesid®), fludarabine phosphate (Fludara®), 5-fluorouracil (Adrucil®, Efudex®), flutamide (Eulexin®), tezacitibine, Gemcitabine (difluorodeoxycitidine), hydroxyurea (Hydrea®), Idarubicin (Idamycin®), ifosfamide (IFEX®), irinotecan (Camptosar®), L-asparaginase (ELSPAR®), leucovorin calcium, melphalan (Alkeran®), 6-mercaptopurine (Purinethol®), methotrexate (Folex®), mitoxantrone (Novantrone®), mylotarg, paclitaxel (Taxol®), phoenix (Yttrium90/MX-DTPA), pentostatin, polifeprosan 20 with carmustine implant (Gliadel®), tamoxifen citrate (Nolvadex®), teniposide (Vumon®), 6-thioguanine, thiotepa, tirapazamine (Tirazone®), topotecan hydrochloride for injection (Hycamptin®), vinblastine (Velban®), vincristine (Oncovin®), and vinorelbine (Navelbine®).

[0851] Anti-cancer agents of particular interest for the combinations disclosed herein include: anthracyclines; alkylating agents; antimetabolites; drugs that inhibit either the calcium dependent phosphatase calcineurin or the p70S6 kinase FK506) or inhibit the p70S6 kinase; mTOR inhibitors; immunomodulators; anthracyclines; vinca alkaloids; proteosome inhibitors; GITR agonists; protein tyrosine phosphatase inhibitors; a CDK4 kinase inhibitor; a BTK inhibitor; a MKN kinase inhibitor; a DGK kinase inhibitor; or an oncolytic virus.

[0852] Exemplary antimetabolites include, without limitation, pyrimidine analogs, purine analogs and adenosine deaminase inhibitors): methotrexate (Rheumatrex®, Trexall®), 5-fluorouracil (Adrucil®, Efudex®, Fluoroplex®), floxuridine (FUDF®), cytarabine (Cytosar-U®, Tarabine PFS), 6-mercaptopurine (Puri-Nethol®)), 6-thioguanine (Thioguanine Tabloid®), fludarabine phosphate (Fludara®), pentostatin (Nipent®), pemetrexed (Alimta®), raltitrexed (Tomudex®), cladribine (Leustatin®), clofarabine (Clofarex®, Clolar®), azacitidine (Vidaza®), decitabine and gemcitabine (Gemzar®). Preferred antimetabolites include, cytarabine, clofarabine and fludarabine.

[0853] Exemplary alkylating agents include, without limitation, nitrogen mustards, ethylenimine derivatives, alkyl sulfonates, nitrosoureas and triazenes): uracil mustard (Aminouracil Mustard®, Chlorethaminacil®, Demethyldopan®, Desmethyldopan®, Haemanthamine®, Nordopan®, Uracil nitrogen Mustard®, Uracillost®, Uracilmostaza®, Uramustin®, Uramustine®), chlormethine (Mustargen®), cyclophosphamide (Cytoxan®, Neosar®, Clafen®, Endoxan®, Procytox®, Revimmune™), ifosfamide (Mitoxana®), melphalan (Alkeran®), Chlorambucil (Leukeran®), pipobroman (Amedel®, Vercyte®), triethylenemelamine (Hemel®, Hexalen®, Hexastat®), triethylenethiophosphoramine, Temozolomide (Temodar®), thiotepa (Thioplex®), busulfan (Busilvex®, Myleran®), carmustine (BiCNU®), lomustine (CeeNU®), streptozocin (Zanosar®), and Dacarbazine (DTIC-Dome®). Additional exemplary alkylating agents include, without limitation, Oxaliplatin (Eloxatin®); Temozolomide (Temodar® and Temodal®); Dactinomycin (also known as actinomycin-D, Cosmegen®); Melphalan (also known as L-PAM, L-sarcolysin, and phenylalanine mustard, Alkeran®); Altretamine (also known as hexamethylmelamine (HMM), Hexalen®); Carmustine (BiCNU®); Bendamustine (Treanda®); Busulfan (Busulfex® and Myleran®); Carboplatin (Paraplatin®); Lomustine (also known as CCNU, CeeNU®); Cisplatin (also known as CDDP, Platinol® and Platinol®-AQ); Chlorambucil (Leukeran®); Cyclophosphamide (Cytoxan® and Neosar®); Dacarbazine (also known as DTIC, DIC and imidazole carboxamide, DTIC-Dome®); Altretamine (also known as hexamethylmelamine (HMM), Hexalen®); Ifosfamide (Ifex®); Prednumustine; Procarbazine (Matulane®); Mechlorethamine (also known as nitrogen mustard, mustine and mechloroethamine hydrochloride, Mustargen®); Streptozocin (Zanosar®); Thiotepa (also known as thiophosphoamide, TESPA and TSPA, Thioplex®); Cyclophosphamide (Endoxan®, Cytoxan®, Neosar®, Procytox®, Revimmune®); and Bendamustine HCl (Treanda®).

[0854] In embodiments, the combinations disclosed herein include fludarabine, cyclophosphamide, and/or rituximab. In embodiments, the combinations disclosed herein include fludarabine, cyclophosphamide, and rituximab (FCR). In embodiments, the subject has CLL. For example, the subject has a deletion in the short arm of chromosome 17 (del(17p), e.g., in a leukemic cell). In other examples, the subject does not have a del(17p). In embodiments, the subject comprises a leukemic cell comprising a mutation in the immunoglobulin heavy-chain variable-region (IgV_{H}) gene. In other embodiments, the subject does not comprise a leukemic cell comprising a mutation in the immunoglobulin heavy-chain variable-region (IgV_{H}) gene. In embodiments, the fludarabine is administered at a dosage of about 10-50 mg/m² (e.g., about 10-15, 15-20, 20-25, 25-30, 30-35, 35-40, 40-45, or 45-50 mg/m²), e.g., intravenously. In embodiments, the cyclophosphamide is administered at a dosage of about 200-300 mg/m² (e.g., about 200-225, 225-250, 250-275, or 275-300 mg/m²), e.g., intravenously. In embodiments, the rituximab is administered at a dosage of about 400-600 mg/m2 (e.g., 400-450, 450-500, 500-550, or 550-600 mg/m²), e.g., intravenously.

[0855] In embodiments, the combinations disclosed herein include bendamustine and rituximab. In embodiments, the subject has CLL. For example, the subject has a deletion in the short arm of chromosome 17 (del(17p), e.g., in a leukemic cell). In other examples, the subject does not have a del(17p). In embodiments, the subject comprises a leukemic cell comprising a mutation in the immunoglobulin heavy-chain variable-region (IgV_{H}) gene. In other embodiments, the subject does not comprise a leukemic cell comprising a mutation in the immunoglobulin heavy-chain variable-region (IgV_{H}) gene. In embodiments, the bendamustine is administered at a dosage of about 70-110 mg/m2 (e.g., 70-80, 80-90, 90-100, or 100-110 mg/m2), e.g., intravenously. In embodiments, the rituximab is administered at a dosage of about 400-600 mg/m2 (e.g., 400-450, 450-500, 500-550, or 550-600 mg/m²), e.g., intravenously.

[0856] In embodiments, the combinations disclosed herein include rituximab, cyclophosphamide, doxorubicine, vincristine, and/or a corticosteroid (e.g., prednisone). In embodiments, a CAR-expressing cell described herein is administered to a subject in combination with rituximab, cyclophosphamide, doxorubicine, vincristine, and prednisone (R-CHOP). In embodiments, the subject has diffuse large B-cell lymphoma (DLBCL). In embodiments, the subject has nonbulky limited-stage DLBCL (e.g., comprises a tumor having a size/diameter of less than 7 cm). In embodiments, the subject is treated with radiation in combination with the R-CHOP. For example, the subject is administered R-CHOP (e.g., 1-6 cycles, e.g., 1, 2, 3, 4, 5, or 6 cycles of R-CHOP), followed by radiation. In some cases, the subject is administered R-CHOP (e.g., 1-6 cycles, e.g., 1, 2, 3, 4, 5, or 6 cycles of R-CHOP) following radiation.

[0857] In embodiments, the combinations disclosed herein include etoposide, prednisone, vincristine, cyclophosphamide, doxorubicin, and/or rituximab. In embodiments, a CAR-expressing cell described herein is administered to a subject in combination with etoposide, prednisone, vincristine, cyclophosphamide, doxorubicin, and rituximab (EPOCH-R). In embodiments, a CAR-expressing cell described herein is administered to a subject in combination with dose-adjusted EPOCH-R (DA-EPOCH-R). In embodiments, the subject has a B cell lymphoma, e.g., a Myc-rearranged aggressive B cell lymphoma.

[0858] In embodiments, the combinations disclosed herein include rituximab and/or lenalidomide. Lenalidomide ((RS)-3-(4-Amino-1-oxo 1,3-dihydro-2H-isoindol-2-yl)piperidine-2,6-dione) is an immunomodulator. In embodiments, a CAR-expressing cell described herein is administered to a subject in combination with rituximab and lenalidomide. In embodiments, the subject has follicular lymphoma (FL) or mantle cell lymphoma (MCL). In embodiments, the subject has FL and has not previously been treated with a cancer therapy. In embodiments, lenalidomide is administered at a dosage of about 10-20 mg (e.g., 10-15 or 15-20 mg), e.g., daily. In embodiments, rituximab is administered at a dosage of about 350-550 mg/m² (e.g., 350-375, 375-400, 400-425, 425-450, 450-475, or 475-500 mg/m²), e.g., intravenously.

[0859] Exemplary mTOR inhibitors include, e.g., temsirolimus; ridaforolimus (formally known as deferolimus, (1R,2R,4S)-4-[(2R)-2 [(1R,9S,12S,15R,16E,18R,19R,21R, 23S,24E,26E,28Z,30S,32S,35R)-1,18-dihydroxy-19,30-dimethoxy-15,17,21,23, 29,35-hexamethyl-2,3,10,14,20-pentaoxo-11,36-dioxa-4-azatricyclo[30.3.1.0⁴′⁹] hexatriaconta-16,24,26,28-tetraen-12-yl]propyl]-2-methoxycyclohexyl dimethylphosphinate, also known as AP23573 and MK8669, and described in PCT Publication No. WO 03/064383); everolimus (Afinitor® or RAD001); rapamycin (AY22989, Sirolimus®); simapimod (CAS 164301-51-3); emsirolimus, (5-{2,4-Bis[(3S)-3-methylmorpholin-4-yl]pyrido[2,3-d]pyrimidin-7-yl}-2-methoxyphenyl)methanol (AZD8055); 2-Amino-8-[trans-4-(2-hydroxyethoxy)cyclohexyl]-6-(6-methoxy-3-pyridinyl)-4-methyl-pyrido[2,3-d]pyrimidin-7(8H)-one (PF04691502, CAS 1013101-36-4); and N²-[1,4-dioxo-4-[[4-(4-oxo-8-phenyl-4H-1-benzopyran-2-yl)morpholinium-4-yl]methoxy]butyl]-L-arginylglycyl-L-α-aspartylL-serine-(SEQ ID NO: 706), inner salt (SF1126, CAS 936487-67-1), and XL765.

[0860] Exemplary immunomodulators include, e.g., afutuzumab (available from Roche®); pegfilgrastim (Neulasta®); lenalidomide (CC-5013, Revlimid®); thalidomide (Thalomid®), actimid (CC4047); and IRX-2 (mixture of human cytokines including interleukin 1, interleukin 2, and interferon γ, CAS 951209-71-5, available from IRX Therapeutics).

[0861] Exemplary anthracyclines include, e.g., doxorubicin (Adriamycin® and Rubex®); bleomycin (Lenoxane®); daunorubicin (dauorubicin hydrochloride, daunomycin, and rubidomycin hydrochloride, Cerubidine®); daunorubicin liposomal (daunorubicin citrate liposome, DaunoXome®); mitoxantrone (DHAD, Novantrone®); epirubicin (Ellence™); idarubicin (Idamycin®, Idamycin PFS®); mitomycin C (Mutamycin®); geldanamycin; herbimycin; ravidomycin; and desacetylravidomycin.

[0862] Exemplary vinca alkaloids include, e.g., vinorelbine tartrate (Navelbine®), Vincristine (Oncovin®), and Vindesine (Eldisine®)); vinblastine (also known as vinblastine sulfate, vincaleukoblastine and VLB, Alkaban-AQ® and Velban®); and vinorelbine (Navelbine®).

[0863] Exemplary proteosome inhibitors include bortezomib (Velcade®); carfilzomib (PX-171-007, (S)-4-Methyl-N—((S)-1-(((S)-4-methyl-1-((R)-2-methyloxiran-2-yl)-1-oxopentan-2-yl)amino)-1-oxo-3-phenylpropan-2-yl)-2-((S)-2-(2-morpholinoacetamido)-4-phenylbutanamido)-pentanamide); marizomib (NPI-0052); ixazomib citrate (MLN-9708); delanzomib (CEP-18770); and O-Methyl-N-[(2-methyl-5-thiazolyl)carbonyl]-L-seryl-O-methyl-N—R1S)-2-[(2R)-2-methyl-2-oxiranyl]-2-oxo-1-(phenylmethyl)ethyl]-L-serinamide (ONX-0912).

[0864] In embodiments, a CAR-expressing cell described herein is administered to a subject in combination with brentuximab. Brentuximab is an antibody-drug conjugate of anti-CD30 antibody and monomethyl auristatin E. In embodiments, the subject has Hodgkin's lymphoma (HL), e.g., relapsed or refractory HL. In embodiments, the subject comprises CD30+HL. In embodiments, the subject has undergone an autologous stem cell transplant (ASCT). In embodiments, the subject has not undergone an ASCT. In embodiments, brentuximab is administered at a dosage of about 1-3 mg/kg (e.g., about 1-1.5, 1.5-2, 2-2.5, or 2.5-3 mg/kg), e.g., intravenously, e.g., every 3 weeks.

[0865] In embodiments, a CAR-expressing cell described herein is administered to a subject in combination with brentuximab and dacarbazine or in combination with brentuximab and bendamustine. Dacarbazine is an alkylating agent with a chemical name of 5-(3,3-Dimethyl-1-triazenyl)imidazole-4-carboxamide. Bendamustine is an alkylating agent with a chemical name of 4-[5-[Bis(2-chloroethyl)amino]-1-methylbenzimidazol-2-yl]butanoic acid. In embodiments, the subject has Hodgkin's lymphoma (HL). In embodiments, the subject has not previously been treated with a cancer therapy. In embodiments, the subject is at least 60 years of age, e.g., 60, 65, 70, 75, 80, 85, or older. In embodiments, dacarbazine is administered at a dosage of about 300-450 mg/m² (e.g., about 300-325, 325-350, 350-375, 375-400, 400-425, or 425-450 mg/m²), e.g., intravenously. In embodiments, bendamustine is administered at a dosage of about 75-125 mg/m2 (e.g., 75-100 or 100-125 mg/m², e.g., about 90 mg/m²), e.g., intravenously. In embodiments, brentuximab is administered at a dosage of about 1-3 mg/kg (e.g., about 1-1.5, 1.5-2, 2-2.5, or 2.5-3 mg/kg), e.g., intravenously, e.g., every 3 weeks.

[0866] In some embodiments, a CAR-expressing cell described herein is administered to a subject in combination with a CD20 inhibitor, e.g., an anti-CD20 antibody (e.g., an anti-CD20 mono- or bispecific antibody) or a fragment thereof. Exemplary anti-CD20 antibodies include but are not limited to rituximab, ofatumumab, ocrelizumab, veltuzumab, obinutuzumab, TRU-015 (Trubion Pharmaceuticals), ocaratuzumab, and Pro131921 (Genentech). See, e.g., Lim et al. Haematologica. 95.1(2010):135-43.

[0867] In some embodiments, the anti-CD20 antibody comprises rituximab. Rituximab is a chimeric mouse/human monoclonal antibody IgG1 kappa that binds to CD20 and causes cytolysis of a CD20 expressing cell, e.g., as described in www.accessdata.fda.gov/drugsatfda_docs/label/2010/103705s53111bl.pdf. In embodiments, a CAR-expressing cell described herein is administered to a subject in combination with rituximab. In embodiments, the subject has CLL or SLL.

[0868] In some embodiments, rituximab is administered intravenously, e.g., as an intravenous infusion. For example, each infusion provides about 500-2000 mg (e.g., about 500-550, 550-600, 600-650, 650-700, 700-750, 750-800, 800-850, 850-900, 900-950, 950-1000, 1000-1100, 1100-1200, 1200-1300, 1300-1400, 1400-1500, 1500-1600, 1600-1700, 1700-1800, 1800-1900, or 1900-2000 mg) of rituximab. In some embodiments, rituximab is administered at a dose of 150 mg/m² to 750 mg/m², e.g., about 150-175 mg/m², 175-200 mg/m², 200-225 mg/m², 225-250 mg/m², 250-300 mg/m², 300-325 mg/m², 325-350 mg/m², 350-375 mg/m², 375-400 mg/m², 400-425 mg/m², 425-450 mg/m², 450-475 mg/m², 475-500 mg/m², 500-525 mg/m², 525-550 mg/m², 550-575 mg/m², 575-600 mg/m², 600-625 mg/m², 625-650 mg/m², 650-675 mg/m², or 675-700 mg/m², where m² indicates the body surface area of the subject. In some embodiments, rituximab is administered at a dosing interval of at least 4 days, e.g., 4, 7, 14, 21, 28, 35 days, or more. For example, rituximab is administered at a dosing interval of at least 0.5 weeks, e.g., 0.5, 1, 2, 3, 4, 5, 6, 7, 8 weeks, or more. In some embodiments, rituximab is administered at a dose and dosing interval described herein for a period of time, e.g., at least 2 weeks, e.g., at least 2, 3, 4, 5, 6, 7, 8, 9, 10, 11, 12, 13, 14, 15, 16, 17, 18, 19, 20 weeks, or greater. For example, rituximab is administered at a dose and dosing interval described herein fora total of at least 4 doses per treatment cycle (e.g., at least 4, 5, 6, 7, 8, 9, 10, 11, 12, 13, 14, 15, 16, or more doses per treatment cycle).

[0869] In some embodiments, the anti-CD20 antibody comprises ofatumumab. Ofatumumab is an anti-CD20 IgG1κ human monoclonal antibody with a molecular weight of approximately 149 kDa. For example, ofatumumab is generated using transgenic mouse and hybridoma technology and is expressed and purified from a recombinant murine cell line (NSO). See, e.g., www.accessdata.fda.gov/drugsatfda_docs/label/2009/1253261bl.pdf; and Clinical Trial Identifier number NCT01363128, NCT01515176, NCT01626352, and NCT01397591. In embodiments, a CAR-expressing cell described herein is administered to a subject in combination with ofatumumab. In embodiments, the subject has CLL or SLL.

[0870] In some embodiments, ofatumumab is administered as an intravenous infusion. For example, each infusion provides about 150-3000 mg (e.g., about 150-200, 200-250, 250-300, 300-350, 350-400, 400-450, 450-500, 500-550, 550-600, 600-650, 650-700, 700-750, 750-800, 800-850, 850-900, 900-950, 950-1000, 1000-1200, 1200-1400, 1400-1600, 1600-1800, 1800-2000, 2000-2200, 2200-2400, 2400-2600, 2600-2800, or 2800-3000 mg) of ofatumumab. In embodiments, ofatumumab is administered at a starting dosage of about 300 mg, followed by 2000 mg, e.g., for about 11 doses, e.g., for 24 weeks. In some embodiments, ofatumumab is administered at a dosing interval of at least 4 days, e.g., 4, 7, 14, 21, 28, 35 days, or more. For example, ofatumumab is administered at a dosing interval of at least 1 week, e.g., 1, 2, 3, 4, 5, 6, 7, 8, 9, 10, 11, 12, 24, 26, 28, 20, 22, 24, 26, 28, 30 weeks, or more. In some embodiments, ofatumumab is administered at a dose and dosing interval described herein for a period of time, e.g., at least 1 week, e.g., 1, 2, 3, 4, 5, 6, 7, 8, 9, 10, 11, 12, 13, 14, 15, 16, 17, 18, 19, 20, 22, 24, 26, 28, 30, 40, 50, 60 weeks or greater, or 1, 2, 3, 4, 5, 6, 7, 8, 9, 10, 11, 12 months or greater, or 1, 2, 3, 4, 5 years or greater. For example, ofatumumab is administered at a dose and dosing interval described herein for a total of at least 2 doses per treatment cycle (e.g., at least 2, 3, 4, 5, 6, 7, 8, 9, 10, 11, 12, 13, 14, 15, 16, 18, 20, or more doses per treatment cycle).

[0871] In some cases, the anti-CD20 antibody comprises ocrelizumab. Ocrelizumab is a humanized anti-CD20 monoclonal antibody, e.g., as described in Clinical Trials Identifier Nos. NCT00077870, NCT01412333, NCT00779220, NCT00673920, NCT01194570, and Kappos et al. Lancet. 19.378(2011):1779-87.

[0872] In some cases, the anti-CD20 antibody comprises veltuzumab. Veltuzumab is a humanized monoclonal antibody against CD20. See, e.g., Clinical Trial Identifier No. NCT00547066, NCT00546793, NCT01101581, and Goldenberg et al. Leuk Lymphoma. 51(5)(2010):747-55.

[0873] In some cases, the anti-CD20 antibody comprises GA101. GA101 (also called obinutuzumab or R05072759) is a humanized and glyco-engineered anti-CD20 monoclonal antibody. See, e.g., Robak. Curr. Opin. Investig. Drugs. 10.6(2009):588-96; Clinical Trial Identifier Numbers: NCT01995669, NCT01889797, NCT02229422, and NCT01414205; and www.accessdata.fda.gov/drugsatfda_docs/label/2013/125486s0001bl.pdf.

[0874] In some cases, the anti-CD20 antibody comprises AME-133v. AME-133v (also called LY2469298 or ocaratuzumab) is a humanized IgG1 monoclonal antibody against CD20 with increased affinity for the FcγRIIIa receptor and an enhanced antibody dependent cellular cytotoxicity (ADCC) activity compared with rituximab. See, e.g., Robak et al. BioDrugs 25.1(2011):13-25; and Forero-Torres et al. Clin Cancer Res. 18.5(2012):1395-403.

[0875] In some cases, the anti-CD20 antibody comprises PRO131921. PRO131921 is a humanized anti-CD20 monoclonal antibody engineered to have better binding to FcγRIIIa and enhanced ADCC compared with rituximab. See, e.g., Robak et al. BioDrugs 25.1(2011):13-25; and Casulo et al. Clin Immunol. 154.1(2014):37-46; and Clinical Trial Identifier No. NCT00452127.

[0876] In some cases, the anti-CD20 antibody comprises TRU-015. TRU-015 is an anti-CD20 fusion protein derived from domains of an antibody against CD20. TRU-015 is smaller than monoclonal antibodies, but retains Fc-mediated effector functions. See, e.g., Robak et al. BioDrugs 25.1(2011):13-25. TRU-015 contains an anti-CD20 single-chain variable fragment (scFv) linked to human IgG1 hinge, CH2, and CH3 domains but lacks CH1 and CL domains.

[0877] In some embodiments, an anti-CD20 antibody described herein is conjugated or otherwise bound to a therapeutic agent, e.g., a chemotherapeutic agent (e.g., cytoxan, fludarabine, histone deacetylase inhibitor, demethylating agent, peptide vaccine, anti-tumor antibiotic, tyrosine kinase inhibitor, alkylating agent, anti-microtubule or anti-mitotic agent), anti-allergic agent, anti-nausea agent (or anti-emetic), pain reliever, or cytoprotective agent described herein.

[0878] In embodiments, the combinations disclosed herein include a B-cell lymphoma 2 (BCL-2) inhibitor (e.g., venetoclax, also called ABT-199 or GDC-0199) and/or rituximab. In embodiments, a CAR-expressing cell described herein is administered to a subject in combination with venetoclax and rituximab. Venetoclax is a small molecule that inhibits the anti-apoptotic protein, BCL-2. In one embodiment, venetoclax has the chemical name: (4-(4-{[2-(4-chlorophenyl)-4,4-dimethylcyclohex-1-en-1-yl]methyl}piperazin-1-yl)-N-({3-nitro-4-[(tetrahydro-2H-pyran-4-ylmethyl)amino]phenyl}sulfonyl)-2-(1H-pyrrolo[2,3-b]pyridin-5-yloxy)benzamide).

[0879] In embodiments, the subject has CLL. In embodiments, the subject has relapsed CLL, e.g., the subject has previously been administered a cancer therapy. In embodiments, venetoclax is administered at a dosage of about 15-600 mg (e.g., 15-20, 20-50, 50-75, 75-100, 100-200, 200-300, 300-400, 400-500, or 500-600 mg), e.g., daily. In embodiments, rituximab is administered at a dosage of about 350-550 mg/m2 (e.g., 350-375, 375-400, 400-425, 425-450, 450-475, or 475-500 mg/m2), e.g., intravenously, e.g., monthly.

[0880] In some embodiments, the combinations disclosed herein include an oncolytic virus. In embodiments, oncolytic viruses are capable of selectively replicating in and triggering the death of or slowing the growth of a cancer cell. In some cases, oncolytic viruses have no effect or a minimal effect on non-cancer cells. An oncolytic virus includes but is not limited to an oncolytic adenovirus, oncolytic Herpes Simplex Viruses, oncolytic retrovirus, oncolytic parvovirus, oncolytic vaccinia virus, oncolytic Sinbis virus, oncolytic influenza virus, or oncolytic RNA virus (e.g., oncolytic reovirus, oncolytic Newcastle Disease Virus (NDV), oncolytic measles virus, or oncolytic vesicular stomatitis virus (VSV)).

[0881] In some embodiments, the oncolytic virus is a virus, e.g., recombinant oncolytic virus, described in US2010/0178684 A1, which is incorporated herein by reference in its entirety. In some embodiments, a recombinant oncolytic virus comprises a nucleic acid sequence (e.g., heterologous nucleic acid sequence) encoding an inhibitor of an immune or inflammatory response, e.g., as described in US2010/0178684 A1, incorporated herein by reference in its entirety. In embodiments, the recombinant oncolytic virus, e.g., oncolytic NDV, comprises a pro-apoptotic protein (e.g., apoptin), a cytokine (e.g., GM-CSF, interferon-gamma, interleukin-2 (IL-2), tumor necrosis factor-alpha), an immunoglobulin (e.g., an antibody against ED-B firbonectin), tumor associated antigen, a bispecific adapter protein (e.g., bispecific antibody or antibody fragment directed against NDV HN protein and a T cell co-stimulatory receptor, such as CD3 or CD28; or fusion protein between human IL-2 and single chain antibody directed against NDV HN protein). See, e.g., Zamarin et al. Future Microbiol. 7.3(2012):347-67, incorporated herein by reference in its entirety. In some embodiments, the oncolytic virus is a chimeric oncolytic NDV described in U.S. Pat. No. 8,591,881 B2, US 2012/0122185 A1, or US 2014/0271677 A1, each of which is incorporated herein by reference in their entireties.

[0882] In some embodiments, the oncolytic virus comprises a conditionally replicative adenovirus (CRAd), which is designed to replicate exclusively in cancer cells. See, e.g., Alemany et al. Nature Biotechnol. 18(2000):723-27. In some embodiments, an oncolytic adenovirus comprises one described in Table 1 on page 725 of Alemany et al., incorporated herein by reference in its entirety.

[0883] Exemplary oncolytic viruses include but are not limited to the following:

[0884] Group B Oncolytic Adenovirus (ColoAd1) (PsiOxus Therapeutics Ltd.) (see, e.g., Clinical Trial Identifier: NCT02053220);

[0885] ONCOS-102 (previously called CGTG-102), which is an adenovirus comprising granulocyte-macrophage colony stimulating factor (GM-CSF) (Oncos Therapeutics) (see, e.g., Clinical Trial Identifier: NCT01598129);

[0886] VCN-01, which is a genetically modified oncolytic human adenovirus encoding human PH20 hyaluronidase (VCN Biosciences, S.L.) (see, e.g., Clinical Trial Identifiers: NCT02045602 and NCT02045589);

[0887] Conditionally Replicative Adenovirus ICOVIR-5, which is a virus derived from wild-type human adenovirus serotype 5 (Had5) that has been modified to selectively replicate in cancer cells with a deregulated retinoblastoma/E2F pathway (Institut Català d′Oncologia) (see, e.g., Clinical Trial Identifier: NCT01864759);

[0888] Celyvir, which comprises bone marrow-derived autologous mesenchymal stem cells (MSCs) infected with ICOVIR5, an oncolytic adenovirus (Hospital Infantil Universitario Niño Jesús, Madrid, Spain/Ramon Alemany) (see, e.g., Clinical Trial Identifier: NCT01844661);

[0889] CG0070, which is a conditionally replicating oncolytic serotype 5 adenovirus (Ad5) in which human E2F-1 promoter drives expression of the essential Ela viral genes, thereby restricting viral replication and cytotoxicity to Rb pathway-defective tumor cells (Cold Genesys, Inc.) (see, e.g., Clinical Trial Identifier: NCT02143804); or

[0890] DNX-2401 (formerly named Delta-24-RGD), which is an adenovirus that has been engineered to replicate selectively in retinoblastoma (Rb)-pathway deficient cells and to infect cells that express certain RGD-binding integrins more efficiently (Clinica Universidad de Navarra, Universidad de Navarra/DNAtrix, Inc.) (see, e.g., Clinical Trial Identifier: NCT01956734).

[0891] In some embodiments, an oncolytic virus described herein is administering by injection, e.g., subcutaneous, intra-arterial, intravenous, intramuscular, intrathecal, or intraperitoneal injection. In embodiments, an oncolytic virus described herein is administered intratumorally, transdermally, transmucosally, orally, intranasally, or via pulmonary administration.

[0892] In an embodiment, cells expressing a CAR described herein are administered to a subject in combination with a molecule that decreases the Treg cell population. Methods that decrease the number of (e.g., deplete) Treg cells are known in the art and include, e.g., CD25 depletion, cyclophosphamide administration, modulating GITR function. Without wishing to be bound by theory, it is believed that reducing the number of Treg cells in a subject prior to apheresis or prior to administration of a CAR-expressing cell described herein reduces the number of unwanted immune cells (e.g., Tregs) in the tumor microenvironment and reduces the subject's risk of relapse.

[0893] In one embodiment, the combinations disclosed herein include a molecule targeting GITR and/or modulating GITR functions, such as a GITR agonist and/or a GITR antibody that depletes regulatory T cells (Tregs). In embodiments, cells expressing a CAR described herein are administered to a subject in combination with cyclophosphamide. In one embodiment, the GITR binding molecules and/or molecules modulating GITR functions (e.g., GITR agonist and/or Treg depleting GITR antibodies) are administered prior to administration of the CAR-expressing cell. For example, in one embodiment, the GITR agonist can be administered prior to apheresis of the cells. In embodiments, cyclophosphamide is administered to the subject prior to administration (e.g., infusion or re-infusion) of the CAR-expressing cell or prior to aphersis of the cells. In embodiments, cyclophosphamide and an anti-GITR antibody are administered to the subject prior to administration (e.g., infusion or re-infusion) of the CAR-expressing cell or prior to apheresis of the cells. In one embodiment, the subject has cancer (e.g., a solid cancer or a hematological cancer such as ALL or CLL). In an embodiment, the subject has CLL. In embodiments, the subject has ALL. In embodiments, the subject has a solid cancer, e.g., a solid cancer described herein. Exemplary GITR agonists include, e.g., GITR fusion proteins and anti-GITR antibodies (e.g., bivalent anti-GITR antibodies) such as, e.g., a GITR fusion protein described in U.S. Pat. No. 6,111,090, European Patent No.: 090505B1, U.S. Pat. No. 8,586,023, PCT Publication Nos.: WO 2010/003118 and 2011/090754, or an anti-GITR antibody described, e.g., in U.S. Pat. No. 7,025,962, European Patent No.: 1947183B1, U.S. Pat. Nos. 7,812,135, 8,388,967, 8,591,886, European Patent No.: EP 1866339, PCT Publication No.: WO 2011/028683, PCT Publication No.:WO 2013/039954, PCT Publication No.: WO2005/007190, PCT Publication No.: WO 2007/133822, PCT Publication No.: WO2005/055808, PCT Publication No.: WO 99/40196, PCT Publication No.: WO 2001/03720, PCT Publication No.: WO99/20758, PCT Publication No.: WO2006/083289, PCT Publication No.: WO 2005/115451, U.S. Pat. No. 7,618,632, and PCT Publication No.: WO 2011/051726.

[0894] In one embodiment, a CAR expressing cell described herein is administered to a subject in combination with a GITR agonist, e.g., a GITR agonist described herein. In one embodiment, the GITR agonist is administered prior to the CAR-expressing cell. For example, in one embodiment, the GITR agonist can be administered prior to apheresis of the cells.

[0895] In one embodiment, the combinations disclosed herein include an mTOR inhibitor, e.g., an mTOR inhibitor described herein, e.g., a rapalog such as everolimus. In one embodiment, the mTOR inhibitor is administered prior to the CAR-expressing cell. For example, in one embodiment, the mTOR inhibitor can be administered prior to apheresis of the cells.

[0896] In one embodiment the combinations disclosed herein include a protein tyrosine phosphatase inhibitor, e.g., a protein tyrosine phosphatase inhibitor described herein. In one embodiment, the protein tyrosine phosphatase inhibitor is an SHP-1 inhibitor, e.g., an SHP-1 inhibitor described herein, such as, e.g., sodium stibogluconate. In one embodiment, the protein tyrosine phosphatase inhibitor is an SHP-2 inhibitor.

[0897] In one embodiment, the combinations disclosed herein include a kinase inhibitor other than JAK/STAT inhibitor or BTK inhibitor. In one embodiment, the kinase inhibitor is a CDK4 inhibitor, e.g., a CDK4 inhibitor described herein, e.g., a CD4/6 inhibitor, such as, e.g., 6-Acetyl-8-cyclopentyl-5-methyl-2-(5-piperazin-1-yl-pyridin-2-ylamino)-8H-pyrido[2,3-d]pyrimidin-7-one, hydrochloride (also referred to as palbociclib or PD0332991). In one embodiment, the kinase inhibitor is an mTOR inhibitor, e.g., an mTOR inhibitor described herein, such as, e.g., rapamycin, a rapamycin analog, OSI-027. The mTOR inhibitor can be, e.g., an mTORC1 inhibitor and/or an mTORC2 inhibitor, e.g., an mTORC1 inhibitor and/or mTORC2 inhibitor described herein. In one embodiment, the kinase inhibitor is a MNK inhibitor, e.g., a MNK inhibitor described herein, such as, e.g., 4-amino-5-(4-fluoroanilino)-pyrazolo [3,4-d] pyrimidine. The MNK inhibitor can be, e.g., a MNK1a, MNK1b, MNK2a and/or MNK2b inhibitor. In one embodiment, the kinase inhibitor is a DGK inhibitor, e.g., a DGK inhibitor described herein, such as, e.g., DGKinh1 (D5919) or DGKinh2 (D5794). In one embodiment, the kinase inhibitor is a CDK4 inhibitor selected from aloisine A; flavopiridol or HMR-1275, 2-(2-chlorophenyl)-5,7-dihydroxy-8-[(3S,4R)-3-hydroxy-1-methyl-4-piperidinyl]-4-chromenone; crizotinib (PF-02341066; 2-(2-Chlorophenyl)-5,7-dihydroxy-8-[(2R,3S)-2-(hydroxymethyl)-1-methyl-3-pyrrolidinyl]-4H-1-benzopyran-4-one, hydrochloride (P276-00); 1-methyl-5-[[2-[5-(trifluoromethyl)-1H-imidazol-2-yl]-4-pyridinyl]oxy]-N-[4-(trifluoromethyl)phenyl]-1H-benzimidazol-2-amine (RAF265); indisulam (E7070); roscovitine (CYC202); palbociclib (PD0332991); dinaciclib (SCH727965); N-[5-[[(5-tert-butyloxazol-2-yl)methyl]thio]thiazol-2-yl]piperidine-4-carboxamide (BMS 387032); 44-[9-chloro-7-(2,6-difluorophenyl)-5H-pyrimido[5,4-d][2]benzazepin-2-yl]amino]-benzoic acid (MLN8054); 5-[3-(4,6-difluoro-1H-benzimidazol-2-yl)-1H-indazol-5-yl]-N-ethyl-4-methyl-3-pyridinemethanamine (AG-024322); 4-(2,6-dichlorobenzoylamino)-1H-pyrazole-3-carboxylic acid N-(piperidin-4-yl)amide (AT7519); 4-[2-methyl-1-(1-methylethyl)-1H-imidazol-5-yl]-N-[4-(methylsulfonyl)phenyl]-2-pyrimidinamine (AZD5438); and XL281 (BMS908662).

[0898] In one embodiment, the kinase inhibitor is a CDK4 inhibitor, e.g., palbociclib (PD0332991), and the palbociclib is administered at a dose of about 50 mg, 60 mg, 70 mg, 75 mg, 80 mg, 90 mg, 100 mg, 105 mg, 110 mg, 115 mg, 120 mg, 125 mg, 130 mg, 135 mg (e.g., 75 mg, 100 mg or 125 mg) daily for a period of time, e.g., daily for 14-21 days of a 28 day cycle, or daily for 7-12 days of a 21 day cycle. In one embodiment, 1, 2, 3, 4, 5, 6, 7, 8, 9, 10, 11, 12 or more cycles of palbociclib are administered.

[0899] In embodiments, a CAR-expressing cell described herein is administered to a subject in combination with a cyclin-dependent kinase (CDK) 4 or 6 inhibitor, e.g., a CDK4 inhibitor or a CDK6 inhibitor described herein. In embodiments, a CAR-expressing cell described herein is administered to a subject in combination with a CDK4/6 inhibitor (e.g., an inhibitor that targets both CDK4 and CDK6), e.g., a CDK4/6 inhibitor described herein. In an embodiment, the subject has MCL. MCL is an aggressive cancer that is poorly responsive to currently available therapies, i.e., essentially incurable. In many cases of MCL, cyclin D1 (a regulator of CDK4/6) is expressed (e.g., due to chromosomal translocation involving immunoglobulin and Cyclin D1 genes) in MCL cells. Thus, without being bound by theory, it is thought that MCL cells are highly sensitive to CDK4/6 inhibition with high specificity (i.e., minimal effect on normal immune cells). CDK4/6 inhibitors alone have had some efficacy in treating MCL, but have only achieved partial remission with a high relapse rate. An exemplary CDK4/6 inhibitor is LEE011 (also called ribociclib), the structure of which is shown below.

[chemical structure]

[0900] Without being bound by theory, it is believed that administration of a CAR-expressing cell described herein with a CDK4/6 inhibitor (e.g., LEE011 or other CDK4/6 inhibitors described herein) can achieve higher responsiveness, e.g., with higher remission rates and/or lower relapse rates, e.g., compared to a CDK4/6 inhibitor alone.

[0901] In one embodiment, the kinase inhibitor is an mTOR inhibitor selected from temsirolimus; ridaforolimus (1R,2R,4S)-4-[(2R)-2 [(1R,9S,12S,15R,16E,18R,19R,21R, 23S,24E,26E,28Z,30S,32S,35R)-1,18-dihydroxy-19,30-dimethoxy-15,17,21,23, 29,35-hexamethyl-2,3,10,14,20-pentaoxo-11,36-dioxa-4-azatricyclo[30.3.1.0^{4,9}] hexatriaconta-16,24,26,28-tetraen-12-yl]propyl]-2-methoxycyclohexyl dimethylphosphinate, also known as AP23573 and MK8669; everolimus (RAD001); rapamycin (AY22989); simapimod; (5-{2,4-bis[(3S)-3-methylmorpholin-4-yl]pyrido[2,3-d]pyrimidin-7-yl}-2-methoxyphenyl)methanol (AZD8055); 2-mmino-8-[trans-4-(2-hydroxyethoxy)cyclohexyl]-6-(6-methoxy-3-pyridinyl)-4-methyl-pyrido[2,3-d]pyrimidin-7(8H)-one (PF04691502); and N²-[1,4-dioxo-4-[[4-(4-oxo-8-phenyl-4H-1-benzopyran-2-yl)morpholinium-4-yl]methoxy]butyl]-L-arginylglycyl-L-α-aspartylL-serine- (SEQ ID NO: 706), inner salt (SF1126); and XL765.

[0902] In one embodiment, the kinase inhibitor is an mTOR inhibitor, e.g., rapamycin, and the rapamycin is administered at a dose of about 3 mg, 4 mg, 5 mg, 6 mg, 7 mg, 8 mg, 9 mg, 10 mg (e.g., 6 mg) daily for a period of time, e.g., daily for 21 day cycle cycle, or daily for 28 day cycle. In one embodiment, 1, 2, 3, 4, 5, 6, 7, 8, 9, 10, 11, 12 or more cycles of rapamycin are administered. In one embodiment, the kinase inhibitor is an mTOR inhibitor, e.g., everolimus and the everolimus is administered at a dose of about 2 mg, 2.5 mg, 3 mg, 4 mg, 5 mg, 6 mg, 7 mg, 8 mg, 9 mg, 10 mg, 11 mg, 12 mg, 13 mg, 14 mg, 15 mg (e.g., 10 mg) daily fora period of time, e.g., daily for 28 day cycle. In one embodiment, 1, 2, 3, 4, 5, 6, 7, 8, 9, 10, 11, 12 or more cycles of everolimus are administered.

[0903] In one embodiment, the kinase inhibitor is an MNK inhibitor selected from CGP052088; 4-amino-3-(p-fluorophenylamino)-pyrazolo [3,4-d] pyrimidine (CGP57380); cercosporamide; ETC-1780445-2; and 4-amino-5-(4-fluoroanilino)-pyrazolo [3,4-d] pyrimidine.

[0904] In embodiments, a CAR-expressing cell described herein is administered to a subject in combination with a phosphoinositide 3-kinase (PI3K) inhibitor (e.g., a PI3K inhibitor described herein, e.g., idelalisib or duvelisib) and/or rituximab. In embodiments, a CAR-expressing cell described herein is administered to a subject in combination with idelalisib and rituximab. In embodiments, a CAR-expressing cell described herein is administered to a subject in combination with duvelisib and rituximab. Idelalisib (also called GS-1101 or CAL-101; Gilead) is a small molecule that blocks the delta isoform of PI3K. In an embodiment, idelalisib has the chemical name: (5-Fluoro-3-phenyl-2-R1S)-1-(7H-purin-6-ylamino)propyl]-4(3H)-quinazolinone).

[0905] Duvelisib (also called IPI-145; Infinity Pharmaceuticals) is a small molecule that blocks PI3K-δ,γ. In an embodiment, duvelisib has the chemical name: (8-Chloro-2-phenyl-3-[(1S)-1-(9H-purin-6-ylamino)ethyl]-1(2H)-isoquinolinone).

[0906] In embodiments, the subject has CLL. In embodiments, the subject has relapsed CLL, e.g., the subject has previously been administered a cancer therapy (e.g., previously been administered an anti-CD20 antibody or previously been administered ibrutinib). For example, the subject has a deletion in the short arm of chromosome 17 (del(17p), e.g., in a leukemic cell). In other examples, the subject does not have a del(17p). In embodiments, the subject comprises a leukemic cell comprising a mutation in the immunoglobulin heavy-chain variable-region (IgV_{H}) gene. In other embodiments, the subject does not comprise a leukemic cell comprising a mutation in the immunoglobulin heavy-chain variable-region (IgV_{H}) gene. In embodiments, the subject has a deletion in the long arm of chromosome 11 (del(11q)). In other embodiments, the subject does not have a del(11q). In embodiments, idelalisib is administered at a dosage of about 100-400 mg (e.g., 100-125, 125-150, 150-175, 175-200, 200-225, 225-250, 250-275, 275-300, 325-350, 350-375, or 375-400 mg), e.g., BID. In embodiments, duvelisib is administered at a dosage of about 15-100 mg (e.g., about 15-25, 25-50, 50-75, or 75-100 mg), e.g., twice a day. In embodiments, rituximab is administered at a dosage of about 350-550 mg/m² (e.g., 350-375, 375-400, 400-425, 425-450, 450-475, or 475-500 mg/m²), e.g., intravenously.

[0907] In one embodiment, the kinase inhibitor is a dual phosphatidylinositol 3-kinase (PI3K) and mTOR inhibitor selected from 2-Amino-8-[trans-4-(2-hydroxyethoxy)cyclohexyl]-6-(6-methoxy-3-pyridinyl)-4-methyl-pyrido[2,3-d]pyrimidin-7(8H)-one (PF-04691502); N-[4-[[4-(Dimethylamino)-1-piperidinyl]carbonyl]phenyl]-N′-[4-(4,6-di-4-morpholinyl-1,3,5-triazin-2-yl)phenyl]urea (PF-05212384, PKI-587); 2-Methyl-2-{4-[3-methyl-2-oxo-8-(quinolin-3-yl)-2,3-dihydro-1H-imidazo[4,5-c]quinolin-1-yl]phenyl}propanenitrile (BEZ-235); apitolisib (GDC-0980, RG7422); 2,4-Difluoro-N-{2-(methyloxy)-5-[4-(4-pyridazinyl)-6-quinolinyl]-3-pyridinyl}benzenesulfonamide (GSK2126458); 8-(6-methoxypyridin-3-yl)-3-methyl-1-(4-(piperazin-1-yl)-3-(trifluoromethyl)phenyl)-1H-imidazo[4,5-c]quinolin-2(3H)-one Maleic acid (NVP-BGT226); 3-[4-(4-Morpholinylpyrido[3′,2′:4,5]furo[3,2-d]pyrimidin-2-yl]phenol (PI-103); 5-(9-isopropyl-8-methyl-2-morpholino-9H-purin-6-yl)pyrimidin-2-amine (VS-5584, SB2343); and N42-[(3,5-Dimethoxyphenyl)amino]quinoxalin-3-yl]-4-[(4-methyl-3-methoxyphenyl)carbonyl]aminophenylsulfonamide (XL765).

[0908] In embodiments, a CAR-expressing cell described herein is administered to a subject in combination with an anaplastic lymphoma kinase (ALK) inhibitor. Exemplary ALK kinases include but are not limited to crizotinib (Pfizer), ceritinib (Novartis), alectinib (Chugai), brigatinib (also called AP26113; Ariad), entrectinib (Ignyta), PF-06463922 (Pfizer), TSR-011 (Tesaro) (see, e.g., Clinical Trial Identifier No. NCT02048488), CEP-37440 (Teva), and X-396 (Xcovery). In some embodiments, the subject has a solid cancer, e.g., a solid cancer described herein, e.g., lung cancer.

[0909] The chemical name of crizotinib is 3-[(1R)-1-(2,6-dichloro-3-fluorophenyl)ethoxy]-5-(1-piperidin-4-ylpyrazol-4-yl)pyridin-2-amine. The chemical name of ceritinib is 5-Chloro-N²-[2-isopropoxy-5-methyl-4-(4-piperidinyl)phenyl]-N⁴-[2-(isopropylsulfonyl)phenyl]-2,4-pyrimidinediamine. The chemical name of alectinib is 9-ethyl-6,6-dimethyl-8-(4-morpholinopiperidin-1-yl)-11-oxo-6,11-dihydro-5H-benzo[b]carbazole-3-carbonitrile. The chemical name of brigatinib is 5-Chloro-N²-{4-[4-(dimethylamino)-1-piperidinyl]-2-methoxyphenyl}-N⁴-[2-(dimethylphosphoryl)phenyl]-2,4-pyrimidinediamine. The chemical name of entrectinib is N-(5-(3,5-difluorobenzyl)-1H-indazol-3-yl)-4-(4-methylpiperazin-1-yl)-2-((tetrahydro-2H-pyran-4-yl)amino)benzamide. The chemical name of PF-06463922 is (10R)-7-Amino-12-fluoro-2,10,16-trimethyl-15-oxo-10,15,16,17-tetrahydro-2H-8,4-(metheno)pyrazolo[4,3-h][2,5,11]-benzoxadiazacyclotetradecine-3-carbonitrile. The chemical structure of CEP-37440 is (S)-2-((5-chloro-2-((6-(4-(2-hydroxyethyl)piperazin-1-yl)-1-methoxy-6,7,8,9-tetrahydro-5H-benzo[7]annulen-2-yl)amino)pyrimidin-4-yl)amino)-N-methylbenzamide. The chemical name of X-396 is (R)-6-amino-5-(1-(2,6-dichloro-3-fluorophenyl)ethoxy)-N-(4-(4-methylpiperazine-1-carbonyl)phenyl)pyridazine-3-carboxamide.

[0910] Drugs that inhibit either the calcium dependent phosphatase calcineurin (cyclosporine and FK506) or inhibit the p70S6 kinase that is important for growth factor induced signaling (rapamycin). (Liu et al., Cell 66:807-815, 1991; Henderson et al., Immun. 73:316-321, 1991; Bierer et al., Curr. Opin. Immun. 5:763-773, 1993) can also be used. In a further aspect, the cell compositions of the present invention may be administered to a patient in conjunction with (e.g., before, simultaneously or following) bone marrow transplantation, T cell ablative therapy using chemotherapy agents such as, fludarabine, external-beam radiation therapy (XRT), cyclophosphamide, and/or antibodies such as OKT3 or CAMPATH. In one aspect, the cell compositions of the present invention are administered following B-cell ablative therapy such as agents that react with CD20, e.g., Rituxan. For example, in one embodiment, subjects may undergo standard treatment with high dose chemotherapy followed by peripheral blood stem cell transplantation. In certain embodiments, following the transplant, subjects receive an infusion of the expanded immune cells of the present invention. In an additional embodiment, expanded cells are administered before or following surgery.

[0911] In embodiments, a CAR-expressing cell described herein is administered to a subject in combination with an indoleamine 2,3-dioxygenase (IDO) inhibitor. IDO is an enzyme that catalyzes the degradation of the amino acid, L-tryptophan, to kynurenine. Many cancers overexpress IDO, e.g., prostatic, colorectal, pancreatic, cervical, gastric, ovarian, head, and lung cancer. pDCs, macrophages, and dendritic cells (DCs) can express IDO. Without being bound by theory, it is thought that a decrease in L-tryptophan (e.g., catalyzed by IDO) results in an immunosuppressive milieu by inducing T-cell anergy and apoptosis. Thus, without being bound by theory, it is thought that an IDO inhibitor can enhance the efficacy of a CAR-expressing cell described herein, e.g., by decreasing the suppression or death of a CAR-expressing immune cell. In embodiments, the subject has a solid tumor, e.g., a solid tumor described herein, e.g., prostatic, colorectal, pancreatic, cervical, gastric, ovarian, head, or lung cancer. Exemplary inhibitors of IDO include but are not limited to 1-methyl-tryptophan, indoximod (NewLink Genetics) (see, e.g., Clinical Trial Identifier Nos. NCT01191216; NCT01792050), and INCB024360 (Incyte Corp.) (see, e.g., Clinical Trial Identifier Nos. NCT01604889; NCT01685255)

[0912] In embodiments, a CAR-expressing cell described herein is administered to a subject in combination with a modulator of myeloid-derived suppressor cells (MDSCs). MDSCs accumulate in the periphery and at the tumor site of many solid tumors. These cells suppress T cell responses, thereby hindering the efficacy of CAR-expressing cell therapy. Without being bound by theory, it is thought that administration of a MDSC modulator enhances the efficacy of a CAR-expressing cell described herein. In an embodiment, the subject has a solid tumor, e.g., a solid tumor described herein, e.g., glioblastoma. Exemplary modulators of MDSCs include but are not limited to MCS110 and BLZ945. MCS110 is a monoclonal antibody (mAb) against macrophage colony-stimulating factor (M-CSF). See, e.g., Clinical Trial Identifier No. NCT00757757. BLZ945 is a small molecule inhibitor of colony stimulating factor 1 receptor (CSF1R). See, e.g., Pyonteck et al. Nat. Med. 19(2013):1264-72. The structure of BLZ945 is shown below.

[chemical structure]

[0913] In embodiments, a CAR-expressing cell described herein is administered to a subject in combination with an agent that inhibits or reduces the activity of immunosuppressive plasma cells. Immunosuppressive plasma cells have been shown to impede T cell-dependent immunogenic chemotherapy, such as oxaliplatin (Shalapour et al., Nature 2015, 521:94-101). In an embodiment, immunosuppressive plasma cells can express one or more of IgA, interleukin (IL)-10, and PD-L1. In an embodiment, the agent is a CD19 CAR-expressing cell or a BCMA CAR-expressing cell.

[0914] In some embodiments, a CAR-expressing cell described herein is administered to a subject in combination with a interleukin-15 (IL-15) polypeptide, a interleukin-15 receptor alpha (IL-15Ra) polypeptide, or a combination of both a IL-15 polypeptide and a IL-15Ra polypeptide e.g., hetIL-15 (Admune Therapeutics, LLC). hetIL-15 is a heterodimeric non-covalent complex of IL-15 and IL-15Ra. hetIL-15 is described in, e.g., U.S. Pat. No. 8,124,084, U.S. 2012/0177598, U.S. 2009/0082299, U.S. 2012/0141413, and U.S. 2011/0081311, incorporated herein by reference. In embodiments, het-IL-15 is administered subcutaneously. In embodiments, the subject has a cancer, e.g., solid cancer, e.g., melanoma or colon cancer. In embodiments, the subject has a metastatic cancer.

[0915] In embodiments, a subject having a disease described herein, e.g., a hematological disorder, e.g., AML or MDS, is administered a CAR-expressing cell described herein in combination with an agent, e.g., cytotoxic or chemotherapy agent, a biologic therapy (e.g., antibody, e.g., monoclonal antibody, or cellular therapy), or an inhibitor (e.g., kinase inhibitor). In embodiments, the subject is administered a CAR-expressing cell described herein in combination with a cytotoxic agent, e.g., CPX-351 (Celator Pharmaceuticals), cytarabine, daunorubicin, vosaroxin (Sunesis Pharmaceuticals), sapacitabine (Cyclacel Pharmaceuticals), idarubicin, or mitoxantrone. CPX-351 is a liposomal formulation comprising cytarabine and daunorubicin at a 5:1 molar ratio. In embodiments, the subject is administered a CAR-expressing cell described herein in combination with a hypomethylating agent, e.g., a DNA methyltransferase inhibitor, e.g., azacitidine or decitabine. In embodiments, the subject is administered a CAR-expressing cell described herein in combination with a biologic therapy, e.g., an antibody or cellular therapy, e.g., 225Ac-lintuzumab (Actimab-A; Actinium Pharmaceuticals), IPH2102 (Innate Pharma/Bristol Myers Squibb), SGN-CD33A (Seattle Genetics), or gemtuzumab ozogamicin (Mylotarg; Pfizer). SGN-CD33A is an antibody-drug conjugate (ADC) comprising a pyrrolobenzodiazepine dimer that is attached to an anti-CD33 antibody. Actimab-A is an anti-CD33 antibody (lintuzumab) labeled with actinium. IPH2102 is a monoclonal antibody that targets killer immunoglobulin-like receptors (KIRs). In embodiments, the subject is administered a CAR-expressing cell described herein in combination a FLT3 inhibitor, e.g., sorafenib (Bayer), midostaurin (Novartis), quizartinib (Daiichi Sankyo), crenolanib (Arog Pharmaceuticals), PLX3397 (Daiichi Sankyo), AKN-028 (Akinion Pharmaceuticals), or ASP2215 (Astellas). In embodiments, the subject is administered a CAR-expressing cell described herein in combination with an isocitrate dehydrogenase (IDH) inhibitor, e.g., AG-221 (Celgene/Agios) or AG-120 (Agios/Celgene). In embodiments, the subject is administered a CAR-expressing cell described herein in combination with a cell cycle regulator, e.g., inhibitor of polo-like kinase 1 (Plk1), e.g., volasertib (Boehringer Ingelheim); or an inhibitor of cyclin-dependent kinase 9 (Cdk9), e.g., alvocidib (Tolero Pharmaceuticals/Sanofi Aventis). In embodiments, the subject is administered a CAR-expressing cell described herein in combination with a B cell receptor signaling network inhibitor, e.g., an inihibitor of B-cell lymphoma 2 (Bc1-2), e.g., venetoclax (Abbvie/Roche); or an inhibitor of Bruton's tyrosine kinase (Btk), e.g., ibrutinib (Pharmacyclics/Johnson & Johnson Janssen Pharmaceutical). In embodiments, the subject is administered a CAR-expressing cell described herein in combination with an inhibitor of M1 aminopeptidase, e.g., tosedostat (CTI BioPharmaNernalis); an inhibitor of histone deacetylase (HDAC), e.g., pracinostat (MEI Pharma); a multi-kinase inhibitor, e.g., rigosertib (Onconova Therapeutics/Baxter/SymBio); or a peptidic CXCR4 inverse agonist, e.g., BL-8040 (BioLineRx). In embodiments, the subject is administered a CD123-targeting CAR-expressing cell in combination with a CAR-expressing cell that targets an antigen other than CD123, e.g., CLL-1, BCMA, CD33, CD19, FLT-3, or folate receptor beta.

[0916] In another embodiment, the subjects receive an infusion of the CD123 CAR-expressing cell compositions of the present invention prior to transplantation, e.g., allogeneic stem cell transplant, of cells. In a preferred embodiment, CD123-CAR expressing cells transiently express CD123 CAR, e.g., by electroporation of an mRNA CD123 CAR, whereby the expression of the CD123 is terminated prior to infusion of donor stem cells to avoid engraftment failure.

[0917] Some patients may experience allergic reactions to the compounds of the present invention and/or other anti-cancer agent(s) during or after administration; therefore, anti-allergic agents are often administered to minimize the risk of an allergic reaction. Suitable anti-allergic agents include corticosteroids, such as dexamethasone (e.g., Decadron®), beclomethasone (e.g., Beclovent®), hydrocortisone (also known as cortisone, hydrocortisone sodium succinate, hydrocortisone sodium phosphate, and sold under the tradenames Ala-Cort®, hydrocortisone phosphate, Solu-Cortef®, Hydrocort Acetate® and Lanacort®), prednisolone (sold under the tradenames Delta-Cortel®, Orapred®, Pediapred® and Prelone®), prednisone (sold under the tradenames Deltasone®, Liquid Red®, Meticorten® and Orasone®), methylprednisolone (also known as 6-methylprednisolone, methylprednisolone acetate, methylprednisolone sodium succinate, sold under the tradenames Duralone®, Medralone®, Medrol®, M-Prednisol® and Solu-Medrol®); antihistamines, such as diphenhydramine (e.g., Benadryl®), hydroxyzine, and cyproheptadine; and bronchodilators, such as the beta-adrenergic receptor agonists, albuterol (e.g., Proventil®), and terbutaline (Brethine®).

[0918] Some patients may experience nausea during and after administration of the compound of the present invention and/or other anti-cancer agent(s); therefore, anti-emetics are used in preventing nausea (upper stomach) and vomiting. Suitable anti-emetics include aprepitant (Emend®), ondansetron (Zofran®), granisetron HCl (Kytril®), lorazepam (Ativan®. dexamethasone (Decadron®), prochlorperazine (Compazine®), casopitant (Rezonic® and Zunrisa®), and combinations thereof.

[0919] Medication to alleviate the pain experienced during the treatment period is often prescribed to make the patient more comfortable. Common over-the-counter analgesics, such Tylenol®, are often used. However, opioid analgesic drugs such as hydrocodone/paracetamol or hydrocodone/acetaminophen (e.g., Vicodin®), morphine (e.g., Astramorph® or Avinza®), oxycodone (e.g., OxyContin® or Percocet®), oxymorphone hydrochloride (Opana®), and fentanyl (e.g., Duragesic®) are also useful for moderate or severe pain.

[0920] In an effort to protect normal cells from treatment toxicity and to limit organ toxicities, cytoprotective agents (such as neuroprotectants, free-radical scavengers, cardioprotectors, anthracycline extravasation neutralizers, nutrients and the like) may be used as an adjunct therapy. Suitable cytoprotective agents include Amifostine (Ethyol®), glutamine, dimesna (Tavocept®), mesna (Mesnex®), dexrazoxane (Zinecard® or Totect®), xaliproden (Xaprila®), and leucovorin (also known as calcium leucovorin, citrovorum factor and folinic acid).

[0921] The structure of the active compounds identified by code numbers, generic or trade names may be taken from the actual edition of the standard compendium “The Merck Index” or from databases, e.g. Patents International (e.g. IMS World Publications).

[0922] The above-mentioned compounds, which can be used in combination with a compound of the present invention, can be prepared and administered as described in the art, such as in the documents cited above.

[0923] In one embodiment, the present invention provides pharmaceutical compositions comprising at least one compound of the present invention (e.g., a compound of the present invention) or a pharmaceutically acceptable salt thereof together with a pharmaceutically acceptable carrier suitable for administration to a human or animal subject, either alone or together with other anti-cancer agents.

[0924] In one embodiment, the present invention provides methods of treating human or animal subjects suffering from a cellular proliferative disease, such as cancer. The present invention provides methods of treating a human or animal subject in need of such treatment, comprising administering to the subject a therapeutically effective amount of a compound of the present invention (e.g., a compound of the present invention) or a pharmaceutically acceptable salt thereof, either alone or in combination with other anti-cancer agents.

[0925] In particular, compositions will either be formulated together as a combination therapeutic or administered separately.

[0926] In combination therapy, the compound of the present invention and other anti-cancer agent(s) may be administered either simultaneously, concurrently or sequentially with no specific time limits, wherein such administration provides therapeutically effective levels of the two compounds in the body of the patient.

[0927] In a preferred embodiment, the compound of the present invention and the other anti-cancer agent(s) is generally administered sequentially in any order by infusion or orally. The dosing regimen may vary depending upon the stage of the disease, physical fitness of the patient, safety profiles of the individual drugs, and tolerance of the individual drugs, as well as other criteria well-known to the attending physician and medical practitioner(s) administering the combination. The compound of the present invention and other anti-cancer agent(s) may be administered within minutes of each other, hours, days, or even weeks apart depending upon the particular cycle being used for treatment. In addition, the cycle could include administration of one drug more often than the other during the treatment cycle and at different doses per administration of the drug.

[0928] In another aspect of the present invention, kits that include one or more compound of the present invention and a combination partner as disclosed herein are provided. Representative kits include (a) a compound of the present invention or a pharmaceutically acceptable salt thereof, (b) at least one combination partner, e.g., as indicated above, whereby such kit may comprise a package insert or other labeling including directions for administration.

[0929] A compound of the present invention may also be used to advantage in combination with known therapeutic processes, for example, the administration of hormones or especially radiation. A compound of the present invention may in particular be used as a radiosensitizer, especially for the treatment of tumors which exhibit poor sensitivity to radiotherapy.

[0930] In one embodiment, the subject can be administered an agent which reduces or ameliorates a side effect associated with the administration of a CAR-expressing cell. Side effects associated with the administration of a CAR-expressing cell include, but are not limited to CRS, and hemophagocytic lymphohistiocytosis (HLH), also termed Macrophage Activation Syndrome (MAS). Symptoms of CRS include high fevers, nausea, transient hypotension, hypoxia, and the like. CRS may include clinical constitutional signs and symptoms such as fever, fatigue, anorexia, myalgias, arthalgias, nausea, vomiting, and headache. CRS may include clinical skin signs and symptoms such as rash. CRS may include clinical gastrointestinal signs and symsptoms such as nausea, vomiting and diarrhea. CRS may include clinical respiratory signs and symptoms such as tachypnea and hypoxemia. CRS may include clinical cardiovascular signs and symptoms such as tachycardia, widened pulse pressure, hypotension, increased cardac output (early) and potentially diminished cardiac output (late). CRS may include clinical coagulation signs and symptoms such as elevated d-dimer, hypofibrinogenemia with or without bleeding. CRS may include clinical renal signs and symptoms such as azotemia. CRS may include clinical hepatic signs and symptoms such as transaminitis and hyperbilirubinemia. CRS may include clinical neurologic signs and symptoms such as headache, mental status changes, confusion, delirium, word finding difficulty or frank aphasia, hallucinations, tremor, dymetria, altered gait, and seizures.

[0931] Accordingly, the methods described herein can comprise administering a CAR-expressing cell described herein to a subject and further administering one or more agents to manage elevated levels of a soluble factor resulting from treatment with a CAR-expressing cell. In one embodiment, the soluble factor elevated in the subject is one or more of IFN-γ, TNFα, IL-2 and IL-6. In an embodiment, the factor elevated in the subject is one or more of IL-1, GM-CSF, IL-10, IL-8, IL-5 and fraktalkine. Therefore, an agent administered to treat this side effect can be an agent that neutralizes one or more of these soluble factors. In one embodiment, the agent that neutralizes one or more of these soluble forms is an antibody or antigen binding fragment thereof. Examples of such agents include, but are not limited to a steroid (e.g., corticosteroid), an inhibitor of TNFα, and an inhibitor of IL-6. An example of a TNFα inhibitor is an anti-TNFα antibody molecule such as, infliximab, adalimumab, certolizumab pegol, and golimumab. Another example of a TNFα inhibitor is a fusion protein such as entanercept. Small molecule inhibitors of TNFα include, but are not limited to, xanthine derivatives (e.g. pentoxifylline) and bupropion. An example of an IL-6 inhibitor is an anti-IL-6 antibody molecule such as tocilizumab (toc), sarilumab, elsilimomab, CNTO 328, ALD518/BMS-945429, CNTO 136, CPSI-2364, CDP6038, VX30, ARGX-109, FE301, and FM101. In one embodiment, the anti-IL-6 antibody molecule is tocilizumab. An example of an IL-1R based inhibitor is anakinra.

[0932] In some embodiment, the subject is administered a corticosteroid, such as, e.g., methylprednisolone, hydrocortisone, among others.

[0933] In some embodiments, the subject is administered a vasopressor, such as, e.g., norepinephrine, dopamine, phenylephrine, epinephrine, vasopres sin, or a combination thereof.

[0934] In an embodiment, the subject can be administered an antipyretic agent. In an embodiment, the subject can be administered an analgesic agent.

[0935] In one embodiment, the subject can be administered an agent which enhances the activity of a CAR-expressing cell. For example, in one embodiment, the agent can be an agent which inhibits an inhibitory molecule, e.g., the agent is a checkpoint inhibitor. Inhibitory molecules, e.g., Programmed Death 1 (PD1), can, in some embodiments, decrease the ability of a CAR-expressing cell to mount an immune effector response. Examples of inhibitory molecules include PD1, PD-L1, CTLA4, TIM3, LAGS, VISTA, BTLA, TIGIT, LAIR1, CD160, 2B4 and TGF beta. Inhibition of an inhibitory molecule, e.g., by inhibition at the DNA, RNA or protein level, can optimize a CAR-expressing cell performance. In embodiments, an inhibitory nucleic acid, e.g., an inhibitory nucleic acid, e.g., a dsRNA, e.g., an siRNA or shRNA, a clustered regularly interspaced short palindromic repeats (CRISPR), a transcription-activator like effector nuclease (TALEN), or a zinc finger endonuclease (ZFN), e.g., as described herein, can be used to inhibit expression of an inhibitory molecule in the CAR-expressing cell. In an embodiment the inhibitor is an shRNA. In an embodiment, the inhibitory molecule is inhibited within a CAR-expressing cell. In these embodiments, a dsRNA molecule that inhibits expression of the inhibitory molecule is linked to the nucleic acid that encodes a component, e.g., all of the components, of the CAR.

[0936] In an embodiment, a nucleic acid molecule that encodes a dsRNA molecule that inhibits expression of the molecule that modulates or regulates, e.g., inhibits, T-cell function is operably linked to a promoter, e.g., a H1- or a U6-derived promoter such that the dsRNA molecule that inhibits expression of the molecule that modulates or regulates, e.g., inhibits, T-cell function is expressed, e.g., is expressed within a CAR-expressing cell. See e.g., Tiscornia G., “Development of Lentiviral Vectors Expressing siRNA,” Chapter 3, in Gene Transfer: Delivery and Expression of DNA and RNA (eds. Friedmann and Rossi). Cold Spring Harbor Laboratory Press, Cold Spring Harbor, N.Y., USA, 2007; Brummelkamp T R, et al. (2002) Science 296: 550-553; Miyagishi M, et al. (2002) Nat. Biotechnol. 19: 497-500. In an embodiment the nucleic acid molecule that encodes a dsRNA molecule that inhibits expression of the molecule that modulates or regulates, e.g., inhibits, T-cell function is present on the same vector, e.g., a lentiviral vector, that comprises a nucleic acid molecule that encodes a component, e.g., all of the components, of the CAR. In such an embodiment, the nucleic acid molecule that encodes a dsRNA molecule that inhibits expression of the molecule that modulates or regulates, e.g., inhibits, T-cell function is located on the vector, e.g., the lentiviral vector, 5′- or 3′- to the nucleic acid that encodes a component, e.g., all of the components, of the CAR. The nucleic acid molecule that encodes a dsRNA molecule that inhibits expression of the molecule that modulates or regulates, e.g., inhibits, T-cell function can be transcribed in the same or different direction as the nucleic acid that encodes a component, e.g., all of the components, of the CAR.

[0937] In an embodiment the nucleic acid molecule that encodes a dsRNA molecule that inhibits expression of the molecule that modulates or regulates, e.g., inhibits, T-cell function is present on a vector other than the vector that comprises a nucleic acid molecule that encodes a component, e.g., all of the components, of the CAR. In an embodiment, the nucleic acid molecule that encodes a dsRNA molecule that inhibits expression of the molecule that modulates or regulates, e.g., inhibits, T-cell function it transiently expressed within a CAR-expressing cell. In an embodiment, the nucleic acid molecule that encodes a dsRNA molecule that inhibits expression of the molecule that modulates or regulates, e.g., inhibits, T-cell function is stably integrated into the genome of a CAR-expressing cell.

[0938] Examples of dsRNA molecules useful for inhibiting expression of a molecule that modulates or regulates, e.g., inhibits, T-cell function, wherein the molecule that modulates or regulates, e.g., inhibits, T-cell function is PD-1 are provided below.

[0939] Provided in Table 18A below are the names of PDCD1 (PD1) RNAi agents (derived from their position in the mouse PDCD1 gene sequence NM_008798.2), along with the SEQ ID NOs: 216-263 representing the DNA sequence. Both sense (S) and antisense (AS) sequences are presented as 19mer and 21mer sequences are in this table. Also note that the position (PoS, e.g., 176) is derived from the position number in the mouse PDCD1 gene sequence NM_008798.2. SEQ ID NOs are indicated in groups of 12 that correspond with “sense 19” SEQ ID NOs: 608-619; “sense 21” SEQ ID NOs: 620-631; “asense 21” SEQ ID NOs: 632-643; “asense 19” SEQ ID NOs: 644-655.

TABLE 18A
Mouse PDCD1 (PD1) shRNA sequences

| Position | | | | | |
|---|---|---|---|---|---|
| on | Target | | | | |
| NM_008798.2 | region | Sense19 | Sense21 | Asense21 | Asense19 |
| 176 | CDS | GGAGGTCCC | CTGGAGGTC | TAGAAGGTG | TAGAAGGTG |
| | | TCACCTTCTA | CCTCACCTTC | AGGGACCTC | AGGGACCTC |
| | | (SEQ ID NO: | TA | CAG | C (SEQ ID NO: |
| | | 608) | (SEQ ID NO: | (SEQ ID NO: | 644) |
| | | | 620) | 632) | |
| 260 | CDS | CGGAGGATC | GTCGGAGGA | TTCAGCATA | TTCAGCATA |
| | | TTATGCTGA | TCTTATGCTG | AGATCCTCC | AGATCCTCCG |
| | | A (SEQ ID NO: | AA | GAC | (SEQ ID NO: |
| | | 609) | (SEQ ID NO: | (SEQ ID NO: | 645) |
| | | | 621) | 633) | |
| 359 | CDS | CCCGCTTCCA | TGCCCGCTT | TGTATGATCT | TGTATGATC |
| | | GATCATACA | CCAGATCAT | GGAAGCGGG | TGGAAGCGGG |
| | | (SEQ ID NO: | ACA | CA | (SEQ ID NO: |
| | | 610) | (SEQ ID NO: | (SEQ ID NO: | 646) |
| | | | 622) | 634) | |
| 528 | CDS | GGAGACCTC | CTGGAGACC | ATATCTTGTT | ATATCTTGTT |
| | | AACAAGATA | TCAACAAGA | GAGGTCTCC | GAGGTCTCC |
| | | T (SEQ ID NO: | TAT | AG | (SEQ ID NO: |
| | | 611) | (SEQ ID NO: | (SEQ ID NO: | 647) |
| | | | 623) | 635) | |
| 581 | CDS | AAGGCATGG | TCAAGGCAT | ATACCAATG | ATACCAATG |
| | | TCATTGGTAT | GGTCATTGG | ACCATGCCT | ACCATGCCTT |
| | | (SEQ ID NO: | TAT | TGA | (SEQ ID NO: |
| | | 612) | (SEQ ID NO: | (SEQ ID NO: | 648) |
| | | | 624) | 636) | |
| 584 | CDS | GCATGGTCA | AGGCATGGT | ATGATACCA | ATGATACCA |
| | | TTGGTATCA | CATTGGTAT | ATGACCATG | ATGACCATGC |
| | | T (SEQ ID NO: | CAT | CCT | (SEQ ID NO: |
| | | 613) | (SEQ ID NO: | (SEQ ID NO: | 649) |
| | | | 625) | 637) | |
| 588 | CDS | GGTCATTGG | ATGGTCATT | ATGGTCATT | ATGGTCATT |
| | | TATCATGAG | GGTATCATG | GGTATCATG | GGTATCATG |
| | | T (SEQ ID NO: | AGT | AGT | A (SEQ ID NO: |
| | | 614) | (SEQ ID NO: | (SEQ ID NO: | 650) |
| | | | 626) | 638) | |
| 609 | CDS | CCTAGTGGG | GCCCTAGTG | GCCCTAGTG | GCCCTAGTG |
| | | TATCCCTGT | GGTATCCCT | GGTATCCCT | GGTATCCCTG |
| | | A (SEQ ID NO: | GTA | GTA | (SEQ ID NO: |
| | | 615) | (SEQ ID NO: | (SEQ ID NO: | 651) |
| | | | 627) | 639) | |
| 919 | CDS | GAGGATGGA | ATGAGGATG | ATGAGGATG | ATGAGGATG |
| | | CATTGTTCTT | GACATTGTT | GACATTGTT | GACATTGTTC |
| | | (SEQ ID NO: | CTT | CTT | (SEQ ID NO: |
| | | 616) | (SEQ ID NO: | (SEQ ID NO: | 652) |
| | | | 628) | 640) | |
| 1021 | 3′UTR | GCATGCAGG | GAGCATGCA | GAGCATGCA | GAGCATGCA |
| | | CTACAGTTC | GGCTACAGT | GGCTACAGT | GGCTACAGTT |
| | | A (SEQ ID NO: | TCA | TCA | (SEQ ID NO: |
| | | 617) | (SEQ ID NO: | (SEQ ID NO: | 653) |
| | | | 629) | 641) | |
| 1097 | 3′UTR | CCAGCACAT | TTCCAGCAC | TTCCAGCAC | TTCCAGCAC |
| | | GCACTGTTG | ATGCACTGT | ATGCACTGT | ATGCACTGTT |
| | | A (SEQ ID NO: | TGA | TGA | (SEQ ID NO: |
| | | 618) | (SEQ ID NO: | (SEQ ID NO: | 654) |
| | | | 630) | 642) | |
| 1101 | 3′UTR | CACATGCAC | AGCACATGC | AGCACATGC | AGCACATGC |
| | | TGTTGAGTG | ACTGTTGAG | ACTGTTGAG | ACTGTTGAGT |
| | | A (SEQ ID NO: | TGA | TGA | (SEQ ID NO: |
| | | 619) | (SEQ ID NO: | (SEQ ID NO: | 655) |
| | | | 631) | 643) | |

[0940] Provided in Table 19A below are the names of PDCD1 (PD1) RNAi agents (derived from their position in the human PDCD1 gene sequence, along with the SEQ ID NOs. 264-311 representing the DNA sequence. Both sense (S) and antisense (AS) sequences are presented as 19mer and 21mer sequences. SEQ ID NOs are indicated in groups of 12 that correspond with “sense 19” SEQ ID NOs: 656-667; “sense 21” SEQ ID NOs: 668-679; “asense 21” SEQ ID NOs: 680-691; “asense 19” SEQ ID NOs: 692-703.

TABLE 19A
Human PDCD1 (PD1) shRNA sequences

| Position | | | | | |
|---|---|---|---|---|---|
| on | Target | | | | |
| NM_005018.2 | region | Sense19 | Asense19 | Sense21 | Asense21 |
| 145 | CDS | GGCCAGGATGG | TCTAAGAACCA | GCGGCCAGGAT | TCTAAGAACCA |
| | | TTCTTAGA (SEQ | TCCTGGCC | GGTTCTTAGA | TCCTGGCCGC |
| | | ID NO: 656) | (SEQ ID NO: 668) | (SEQ ID NO: 680) | (SEQ ID NO: 692) |
| 271 | CDS | GCTTCGTGCTA | TACCAGTTTAG | GAGCTTCGTGC | TACCAGTTTAG |
| | | AACTGGTA | CACGAAGC | TAAACTGGTA | CACGAAGCTC |
| | | (SEQ ID NO: 657) | (SEQ ID NO: 669) | (SEQ ID NO: 681) | (SEQ ID NO: 693) |
| 393 | CDS | GGGCGTGACTT | TCATGTGGAAG | ACGGGCGTGAC | TCATGTGGAAG |
| | | CCACATGA | TCACGCCC | TTCCACATGA | TCACGCCCGT |
| | | (SEQ ID NO: 658) | (SEQ ID NO: 670) | (SEQ ID NO: 682) | (SEQ ID NO: 694) |
| 1497 | 3′UTR | CAGGCCTAGAG | TGAAACTTCTC | TGCAGGCCTAG | TGAAACTTCTC |
| | | AAGTTTCA | TAGGCCTG | AGAAGTTTCA | TAGGCCTGCA |
| | | (SEQ ID NO: 659) | (SEQ ID NO: 671) | (SEQ ID NO: 683) | (SEQ ID NO: 695) |
| 1863 | 3′UTR | CTTGGAACCCA | TTCAGGAATGG | TCCTTGGAACC | TTCAGGAATGG |
| | | TTCCTGAA | GTTCCAAG | CATTCCTGAA | GTTCCAAGGA |
| | | (SEQ ID NO: 660) | (SEQ ID NO: 672) | (SEQ ID NO: 684) | (SEQ ID NO: 696) |
| 1866 | 3′UTR | GGAACCCATTC | AATTTCAGGAA | TTGGAACCCAT | AATTTCAGGAA |
| | | CTGAAATT | TGGGTTCC | TCCTGAAATT | TGGGTTCCAA |
| | | (SEQ ID NO: 661) | (SEQ ID NO: 673) | (SEQ ID NO: 685) | (SEQ ID NO: 697) |
| 1867 | 3′UTR | GAACCCATTCC | TAATTTCAGGA | TGGAACCCATT | TAATTTCAGGA |
| | | TGAAATTA | ATGGGTTC | CCTGAAATTA | ATGGGTTCCA |
| | | (SEQ ID NO: 662) | (SEQ ID NO: 674) | (SEQ ID NO: 686) | (SEQ ID NO: 698) |
| 1868 | 3′UTR | AACCCATTCCT | ATAATTTCAGG | GGAACCCATTC | ATAATTTCAGG |
| | | GAAATTAT | AATGGGTT | CTGAAATTAT | AATGGGTTCC |
| | | (SEQ ID NO: 663) | (SEQ ID NO: 675) | (SEQ ID NO: 687) | (SEQ ID NO: 699) |
| 1869 | 3′UTR | ACCCATTCCTG | AATAATTTCAG | GAACCCATTCC | AATAATTTCAG |
| | | AAATTATT | GAATGGGT | TGAAATTATT | GAATGGGTTC |
| | | (SEQ ID NO: 664) | (SEQ ID NO: 676) | (SEQ ID NO: 688) | (SEQ ID NO: 700) |
| 1870 | 3′UTR | CCCATTCCTGA | AAATAATTTCA | AACCCATTCCT | AAATAATTTCA |
| | | AATTATTT | GGAATGGG | GAAATTATTT | GGAATGGGTT |
| | | (SEQ ID NO: 665) | (SEQ ID NO: 677) | (SEQ ID NO: 689) | (SEQ ID NO: 701) |
| 2079 | 3′UTR | CTGTGGTTCTAT | TAATATAATAG | CCCTGTGGTTCT | TAATATAATAG |
| | | TATATTA | AACCACAG | ATTATATTA | AACCACAGGG |
| | | (SEQ ID NO: 666) | (SEQ ID NO: 678) | (SEQ ID NO: 690) | (SEQ ID NO: 702) |
| 2109 | 3′UTR | AAATATGAGAG | TTAGCATGCTC | TTAAATATGAG | TTAGCATGCTC |
| | | CATGCTAA | TCATATTT | AGCATGCTAA | TCATATTTAA |
| | | (SEQ ID NO: 667) | (SEQ ID NO: 679) | (SEQ ID NO: 691) | (SEQ ID NO: 703) |

[0941] In one embodiment, the inhibitor of an inhibitory signal can be, e.g., an antibody or antibody fragment that binds to an inhibitory molecule. For example, the agent can be an antibody or antibody fragment that binds to PD1, PD-L1, PD-L2 or CTLA4 (e.g., ipilimumab (also referred to as MDX-010 and MDX-101, and marketed as Yervoy®; Bristol-Myers Squibb; Tremelimumab (IgG2 monoclonal antibody available from Pfizer, formerly known as ticilimumab, CP-675,206).). In an embodiment, the agent is an antibody or antibody fragment that binds to TIM3. In an embodiment, the agent is an antibody or antibody fragment that binds to LAG3. In embodiments, the agent that enhances the activity of a CAR-expressing cell, e.g., inhibitor of an inhibitory molecule, is administered in combination with an allogeneic CAR, e.g., an allogeneic CAR described herein (e.g., described in the Allogeneic CAR section herein).

[0942] PD-1 is an inhibitory member of the CD28 family of receptors that also includes CD28, CTLA-4, ICOS, and BTLA. PD-1 is expressed on activated B cells, T cells and myeloid cells (Agata et al. 1996 Int. Immunol 8:765-75). Two ligands for PD-1, PD-L1 and PD-L2 have been shown to downregulate T cell activation upon binding to PD-1 (Freeman et a. 2000 J Exp Med 192:1027-34; Latchman et al. 2001 Nat Immunol 2:261-8; Carter et al. 2002 Eur J Immunol 32:634-43). PD-L1 is abundant in human cancers (Dong et al. 2003 J Mol Med 81:281-7; Blank et al. 2005 Cancer Immunol. Immunother 54:307-314; Konishi et al. 2004 Clin Cancer Res 10:5094). Immune suppression can be reversed by inhibiting the local interaction of PD-1 with PD-L1.

[0943] Antibodies, antibody fragments, and other inhibitors of PD-1, PD-L1 and PD-L2 are available in the art and may be used combination with a cars of the present invention described herein. For example, nivolumab (also referred to as BMS-936558 or MDX1106; Bristol-Myers Squibb) is a fully human IgG4 monoclonal antibody which specifically blocks PD-1. Nivolumab (clone 5C4) and other human monoclonal antibodies that specifically bind to PD-1 are disclosed in U.S. Pat. No. 8,008,449 and WO2006/121168. Pidilizumab (CT-011; Cure Tech) is a humanized IgG1k monoclonal antibody that binds to PD-1. Pidilizumab and other humanized anti-PD-1 monoclonal antibodies are disclosed in WO2009/101611. Pembrolizumab (formerly known as lambrolizumab, and also referred to as MK03475; Merck) is a humanized IgG4 monoclonal antibody that binds to PD-1. Pembrolizumab and other humanized anti-PD-1 antibodies are disclosed in U.S. Pat. No. 8,354,509 and WO2009/114335. MEDI4736 (Medimmune) is a human monoclonal antibody that binds to PDL1, and inhibits interaction of the ligand with PD1. MDPL3280A (Genentech/Roche) is a human Fc optimized IgG1 monoclonal antibody that binds to PD-L1. MDPL3280A and other human monoclonal antibodies to PD-L1 are disclosed in U.S. Pat. No. 7,943,743 and U.S Publication No.: 20120039906. Other anti-PD-L1 binding agents include YW243.55.570 (heavy and light chain variable regions are shown in SEQ ID NOs 20 and 21 in WO2010/077634) and MDX-1 105 (also referred to as BMS-936559, and, e.g., anti-PD-L1 binding agents disclosed in WO2007/005874). AMP-224 (B7-DCIg; Amplimmune; e.g., disclosed in WO2010/027827 and WO2011/066342), is a PD-L2 Fc fusion soluble receptor that blocks the interaction between PD-1 and B7-H1. Other anti-PD-1 antibodies include AMP 514 (Amplimmune), among others, e.g., anti-PD-1 antibodies disclosed in U.S. Pat. No. 8,609,089, US 2010028330, and/or US 20120114649.

[0944] In one embodiment, the anti-PD-1 antibody or fragment thereof is an anti-PD-1 antibody molecule as described in US 2015/0210769, entitled “Antibody Molecules to PD-1 and Uses Thereof,” incorporated by reference in its entirety. In one embodiment, the anti-PD-1 antibody molecule includes at least one, two, three, four, five or six CDRs (or collectively all of the CDRs) from a heavy and light chain variable region from an antibody chosen from any of BAP049-hum01, BAP049-hum02, BAP049-hum03, BAP049-hum04, BAP049-hum05, BAP049-hum06, BAP049-hum07, BAP049-hum08, BAP049-hum09, BAP049-hum10, BAP049-hum11, BAP049-hum12, BAP049-hum13, BAP049-hum14, BAP049-hum15, BAP049-hum16, BAP049-Clone-A, BAP049-Clone-B, BAP049-Clone-C, BAP049-Clone-D, or BAP049-Clone-E; or as described in Table 1 of US 2015/0210769, or encoded by the nucleotide sequence in Table 1, or a sequence substantially identical (e.g., at least 80%, 85%, 90%, 92%, 95%, 97%, 98%, 99% or higher identical) to any of the aforesaid sequences; or closely related CDRs, e.g., CDRs which are identical or which have at least one amino acid alteration, but not more than two, three or four alterations (e.g., substitutions, deletions, or insertions, e.g., conservative substitutions).

[0945] In yet another embodiment, the anti-PD-1 antibody molecule comprises at least one, two, three or four variable regions from an antibody described herein, e.g., an antibody chosen from any of BAP049-hum01, BAP049-hum02, BAP049-hum03, BAP049-hum04, BAP049-hum05, BAP049-hum06, BAP049-hum07, BAP049-hum08, BAP049-hum09, BAP049-hum10, BAP049-hum11, BAP049-hum12, BAP049-hum13, BAP049-hum14, BAP049-hum15, BAP049-hum16, BAP049-Clone-A, BAP049-Clone-B, BAP049-Clone-C, BAP049-Clone-D, or BAP049-Clone-E; or as described in Table 1 of US 2015/0210769, or encoded by the nucleotide sequence in Table 1; or a sequence substantially identical (e.g., at least 80%, 85%, 90%, 92%, 95%, 97%, 98%, 99% or higher identical) to any of the aforesaid sequences.

[0946] TIM3 (T cell immunoglobulin-3) also negatively regulates T cell function, particularly in IFN-g-secreting CD4+ T helper 1 and CD8+ T cytotoxic 1 cells, and plays a critical role in T cell exhaustion. Inhibition of the interaction between TIM3 and its ligands, e.g., galectin-9 (Ga19), phosphotidylserine (PS), and HMGB1, can increase immune response. Antibodies, antibody fragments, and other inhibitors of TIM3 and its ligands are available in the art and may be used combination with a CD19 CAR described herein. For example, antibodies, antibody fragments, small molecules, or peptide inhibitors that target TIM3 binds to the IgV domain of TIM3 to inhibit interaction with its ligands. Antibodies and peptides that inhibit TIM3 are disclosed in WO2013/006490 and US20100247521. Other anti-TIM3 antibodies include humanized versions of RMT3-23 (disclosed in Ngiow et al., 2011, Cancer Res, 71:3540-3551), and clone 8B.2C12 (disclosed in Monney et al., 2002, Nature, 415:536-541). Bi-specific antibodies that inhibit TIM3 and PD-1 are disclosed in US20130156774.

[0947] In one embodiment, the anti-TIM3 antibody or fragment thereof is an anti-TIM3 antibody molecule as described in US 2015/0218274, entitled “Antibody Molecules to TIM3 and Uses Thereof,” incorporated by reference in its entirety. In one embodiment, the anti-TIM3 antibody molecule includes at least one, two, three, four, five or six CDRs (or collectively all of the CDRs) from a heavy and light chain variable region from an antibody chosen from any of ABTIM3, ABTIM3-hum01, ABTIM3-hum02, ABTIM3-hum03, ABTIM3-hum04, ABTIM3-hum05, ABTIM3-hum06, ABTIM3-hum07, ABTIM3-hum08, ABTIM3-hum09, ABTIM3-hum10, ABTIM3-hum11, ABTIM3-hum12, ABTIM3-hum13, ABTIM3-hum14, ABTIM3-hum15, ABTIM3-hum16, ABTIM3-hum17, ABTIM3-hum18, ABTIM3-hum19, ABTIM3-hum20, ABTIM3-hum21, ABTIM3-hum22, ABTIM3-hum23; or as described in Tables 1-4 of US 2015/0218274; or encoded by the nucleotide sequence in Tables 1-4; or a sequence substantially identical (e.g., at least 80%, 85%, 90%, 92%, 95%, 97%, 98%, 99% or higher identical) to any of the aforesaid sequences, or closely related CDRs, e.g., CDRs which are identical or which have at least one amino acid alteration, but not more than two, three or four alterations (e.g., substitutions, deletions, or insertions, e.g., conservative substitutions).

[0948] In yet another embodiment, the anti-TIM3 antibody molecule comprises at least one, two, three or four variable regions from an antibody described herein, e.g., an antibody chosen from any of ABTIM3, ABTIM3-hum01, ABTIM3-hum02, ABTIM3-hum03, ABTIM3-hum04, ABTIM3-hum05, ABTIM3-hum06, ABTIM3-hum07, ABTIM3-hum08, ABTIM3-hum09, ABTIM3-hum10, ABTIM3-hum11, ABTIM3-hum12, ABTIM3-hum13, ABTIM3-hum14, ABTIM3-hum15, ABTIM3-hum16, ABTIM3-hum17, ABTIM3-hum18, ABTIM3-hum19, ABTIM3-hum20, ABTIM3-hum21, ABTIM3-hum22, ABTIM3-hum23; or as described in Tables 1-4 of US 2015/0218274; or encoded by the nucleotide sequence in Tables 1-4; or a sequence substantially identical (e.g., at least 80%, 85%, 90%, 92%, 95%, 97%, 98%, 99% or higher identical) to any of the aforesaid sequences

[0949] In other embodiments, the agent that enhances the activity of a CAR-expressing cell is a CEACAM inhibitor (e.g., CEACAM-1, CEACAM-3, and/or CEACAM-5 inhibitor). In one embodiment, the inhibitor of CEACAM is an anti-CEACAM antibody molecule. Exemplary anti-CEACAM-1 antibodies are described in WO 2010/125571, WO 2013/082366 WO 2014/059251 and WO 2014/022332, e.g., a monoclonal antibody 34B1, 26H7, and 5F4; or a recombinant form thereof, as described in, e.g., US 2004/0047858, U.S. Pat. No. 7,132,255 and WO 99/052552. In other embodiments, the anti-CEACAM antibody binds to CEACAM-5 as described in, e.g., Zheng et al. PLoS One. 2010 Sep. 2; 5(9). pii: e12529 (DOI:10:1371/journal.pone.0021146), or crossreacts with CEACAM-1 and CEACAM-5 as described in, e.g., WO 2013/054331 and US 2014/0271618.

[0950] Without wishing to be bound by theory, carcinoembryonic antigen cell adhesion molecules (CEACAM), such as CEACAM-1 and CEACAM-5, are believed to mediate, at least in part, inhibition of an anti-tumor immune response (see e.g., Markel et al. J Immunol. 2002 Mar. 15; 168(6):2803-10; Markel et al. J Immunol. 2006 Nov. 1; 177(9):6062-71; Markel et al. Immunology. 2009 February; 126(2):186-200; Markel et al. Cancer Immunol Immunother. 2010 February; 59(2):215-30; Ortenberg et al. Mol Cancer Ther. 2012 June; 11(6):1300-10; Stern et al. J Immunol. 2005 Jun. 1; 174(11):6692-701; Zheng et al. PLoS One. 2010 Sep. 2; 5(9). pii: e12529). For example, CEACAM-1 has been described as a heterophilic ligand for TIM-3 and as playing a role in TIM-3-mediated T cell tolerance and exhaustion (see e.g., WO 2014/022332; Huang, et al. (2014) Nature doi:10.1038/nature13848). In embodiments, co-blockade of CEACAM-1 and TIM-3 has been shown to enhance an anti-tumor immune response in xenograft colorectal cancer models (see e.g., WO 2014/022332; Huang, et al. (2014), supra). In other embodiments, co-blockade of CEACAM-1 and PD-1 reduce T cell tolerance as described, e.g., in WO 2014/059251. Thus, CEACAM inhibitors can be used with the other immunomodulators described herein (e.g., anti-PD-1 and/or anti-TIM-3 inhibitors) to enhance an immune response against a cancer, e.g., a melanoma, a lung cancer (e.g., NSCLC), a bladder cancer, a colon cancer an ovarian cancer, and other cancers as described herein.

[0951] LAG3 (lymphocyte activation gene-3 or CD223) is a cell surface molecule expressed on activated T cells and B cells that has been shown to play a role in CD8+ T cell exhaustion. Antibodies, antibody fragments, and other inhibitors of LAG3 and its ligands are available in the art and may be used combination with a CD19 CAR described herein. For example, BMS-986016 (Bristol-Myers Squib) is a monoclonal antibody that targets LAG3. IMP701 (Immutep) is an antagonist LAG3 antibody and IMP731 (Immutep and GlaxoSmithKline) is a depleting LAG3 antibody. Other LAG3 inhibitors include IMP321 (Immutep), which is a recombinant fusion protein of a soluble portion of LAG3 and Ig that binds to MHC class II molecules and activates antigen presenting cells (APC). Other antibodies are disclosed, e.g., in WO2010/019570.

[0952] In one embodiment, the anti-LAG3 antibody or fragment thereof is an anti-LAG3 antibody molecule as described in US 2015/0259420, entitled “Antibody Molecules to LAG3 and Uses Thereof,” incorporated by reference in its entirety.

[0953] In one embodiment, the anti-LAG3 antibody molecule includes at least one, two, three, four, five or six CDRs (or collectively all of the CDRs) from a heavy and light chain variable region from an antibody chosen from any of BAP050-hum01, BAP050-hum02, BAP050-hum03, BAP050-hum04, BAP050-hum05, BAP050-hum06, BAP050-hum07, BAP050-hum08, BAP050-hum09, BAP050-hum10, BAP050-hum11, BAP050-hum12, BAP050-hum13, BAP050-hum14, BAP050-hum15, BAP050-hum16, BAP050-hum17, BAP050-hum18, BAP050-hum19, BAP050-hum20, huBAP050(Ser) (e.g., BAP050-hum01-Ser, BAP050-hum02-Ser, BAP050-hum03-Ser, BAP050-hum04-Ser, BAP050-hum05-Ser, BAP050-hum06-Ser, BAP050-hum07-Ser, BAP050-hum08-Ser, BAP050-hum09-Ser, BAP050-hum10-Ser, BAP050-hum11-Ser, BAP050-hum12-Ser, BAP050-hum13-Ser, BAP050-hum14-Ser, BAP050-hum15-Ser, BAP050-hum18-Ser, BAP050-hum19-Ser, or BAP050-hum20-Ser), BAP050-Clone-F, BAP050-Clone-G, BAP050-Clone-H, BAP050-Clone-I, or BAP050-Clone-J; or as described in Table 1 of US 2015/0259420; or encoded by the nucleotide sequence in Table 1; or a sequence substantially identical (e.g., at least 80%, 85%, 90%, 92%, 95%, 97%, 98%, 99% or higher identical) to any of the aforesaid sequences, or closely related CDRs, e.g., CDRs which are identical or which have at least one amino acid alteration, but not more than two, three or four alterations (e.g., substitutions, deletions, or insertions, e.g., conservative substitutions).

[0954] In yet another embodiment, the anti-LAG3 antibody molecule comprises at least one, two, three or four variable regions from an antibody described herein, e.g., an antibody chosen from any of BAP050-hum01, BAP050-hum02, BAP050-hum03, BAP050-hum04, BAP050-hum05, BAP050-hum06, BAP050-hum07, BAP050-hum08, BAP050-hum09, BAP050-hum10, BAP050-hum11, BAP050-hum12, BAP050-hum13, BAP050-hum14, BAP050-hum15, BAP050-hum16, BAP050-hum17, BAP050-hum18, BAP050-hum19, BAP050-hum20, huBAP050(Ser) (e.g., BAP050-hum01-Ser, BAP050-hum02-Ser, BAP050-hum03-Ser, BAP050-hum04-Ser, BAP050-hum05-Ser, BAP050-hum06-Ser, BAP050-hum07-Ser, BAP050-hum08-Ser, BAP050-hum09-Ser, BAP050-hum10-Ser, BAP050-hum11-Ser, BAP050-hum12-Ser, BAP050-hum13-Ser, BAP050-hum14-Ser, BAP050-hum15-Ser, BAP050-hum18-Ser, BAP050-hum19-Ser, or BAP050-hum20-Ser), BAP050-Clone-F, BAP050-Clone-G, BAP050-Clone-H, BAP050-Clone-I, or BAP050-Clone-J; or as described in Table 1 of US 2015/0259420; or encoded by the nucleotide sequence in Tables 1; or a sequence substantially identical (e.g., at least 80%, 85%, 90%, 92%, 95%, 97%, 98%, 99% or higher identical) to any of the aforesaid sequences.

[0955] In some embodiments, the agent which enhances the activity of a CAR-expressing cell can be, e.g., a fusion protein comprising a first domain and a second domain, wherein the first domain is an inhibitory molecule, or fragment thereof, and the second domain is a polypeptide that is associated with a positive signal, e.g., a polypeptide comrpsing an antracellular signaling domain as described herein. In some embodiments, the polypeptide that is associated with a positive signal can include a costimulatory domain of CD28, CD27, ICOS, e.g., an intracellular signaling domain of CD28, CD27 and/or ICOS, and/or a primary signaling domain, e.g., of CD3 zeta, e.g., described herein. In one embodiment, the fusion protein is expressed by the same cell that expressed the CAR. In another embodiment, the fusion protein is expressed by a cell, e.g., a T cell that does not express a CD123 CAR.

[0956] In one embodiment, the agent which enhances activity of a CAR-expressing cell described herein is miR-17-92.

[0957] In one embodiment, the agent which enhances activity of a CAR-described herein is a cytokine. Cytokines have important functions related to T cell expansion, differentiation, survival, and homeostatis. Cytokines that can be administered to the subject receiving a CAR-expressing cell described herein include: IL-2, IL-4, IL-7, IL-9, IL-15, IL-18, and IL-21, or a combination thereof. In preferred embodiments, the cytokine administered is IL-7, IL-15, or IL-21, or a combination thereof. The cytokine can be administered once a day or more than once a day, e.g., twice a day, three times a day, or four times a day. The cytokine can be administered for more than one day, e.g. the cytokine is administered for 2 days, 3 days, 4 days, 5 days, 6 days, 1 week, 2 weeks, 3 weeks, or 4 weeks. For example, the cytokine is administered once a day for 7 days.

[0958] In embodiments, the cytokine is administered in combination with CAR-expressing T cells. The cytokine can be administered simultaneously or concurrently with the CAR-expressing T cells, e.g., administered on the same day. The cytokine may be prepared in the same pharmaceutical composition as the CAR-expressing T cells, or may be prepared in a separate pharmaceutical composition. Alternatively, the cytokine can be administered shortly after administration of the CAR-expressing T cells, e.g., 1 day, 2 days, 3 days, 4 days, 5 days, 6 days, or 7 days after administration of the CAR-expressing T cells. In embodiments where the cytokine is administered in a dosing regimen that occurs over more than one day, the first day of the cytokine dosing regimen can be on the same day as administration with the CAR-expressing T cells, or the first day of the cytokine dosing regimen can be 1 day, 2 days, 3 days, 4 days, 5 days, 6 days, or 7 days after administration of the CAR-expressing T cells. In one embodiment, on the first day, the CAR-expressing T cells are administered to the subject, and on the second day, a cytokine is administered once a day for the next 7 days. In a preferred embodiment, the cytokine to be administered in combination with CAR-expressing T cells is IL-7, IL-15, or IL-21.

[0959] In other embodiments, the cytokine is administered a period of time after administration of CAR-expressing cells, e.g., at least 2 weeks, 3 weeks, 4 weeks, 6 weeks, 8 weeks, 10 weeks, 12 weeks, 4 months, 5 months, 6 months, 7 months, 8 months, 9 months, 10 months, 11 months, or 1 year or more after administration of CAR-expressing cells. In one embodiment, the cytokine is administered after assessment of the subject's response to the CAR-expressing cells. For example, the subject is administered CAR-expressing cells according to the dosage and regimens described herein. The response of the subject to CAR-expressing cell therapy is assessed at 2 weeks, 3 weeks, 4 weeks, 6 weeks, 8 weeks, 10 weeks, 12 weeks, 4 months, 5 months, 6 months, 7 months, 8 months, 9 months, 10 months, 11 months, or 1 year or more after administration of CAR-expressing cells, using any of the methods described herein, including inhibition of tumor growth, reduction of circulating tumor cells, or tumor regression. Subjects that do not exhibit a sufficient response to CAR-expressing cell therapy can be administered a cytokine. Administration of the cytokine to the subject that has sub-optimal response to the CAR-expressing cell therapy improves CAR-expressing cell efficacy or anti-cancer activity. In a preferred embodiment, the cytokine administered after administration of CAR-expressing cells is IL-7.

Combination with CD19 Inhibitors

[0960] The methods and compositions disclosed herein can be used in combination with a CD19 inhibitor. In some embodiments, the CD123CAR-containing cells and the CD19 inhibitor (e.g., one or more cells that express a CAR molecule that binds CD19, e.g., a CAR molecule that binds CD19 described herein) are administered simultaneously or concurrently, or sequentially.

[0961] In some embodiments, the CD123CAR-containing cells and the CD19 inhibitor are infused into a subject simultaneously or concurrently, e.g., are admixed in the same infusion volume. For example, a population of CD123CAR-containing cells and CD19CAR-containing cells are mixed together. Alternatively, a population of cells co-expressing a CD123CAR and a CD19CAR is administered. In other embodiments, the simultaneous administration comprises separate administration of the CD123CAR-containing cells and the CD19 inhibitor, e.g., within a predetermined time interval (e.g., within 15, 30, or 45 minutes of each other).

[0962] In some embodiments, the start of the CD123CAR-containing cells and the start of the CD19 inhibitor are within 1, 2, 3, 4, 6, 12, 18, or 24 hours of each other, or within 1, 2, 3, 4, 5, 10, 15, 20, 25, 30, 35, 40, 60, 80, or 100 days of each other. In some embodiments, the end of the CD123CAR-containing cells delivery and the end of the CD19 inhibitor delivery are within 1, 2, 3, 4, 6, 12, 18, or 24 hours of each other, or within 1, 2, 3, 4, 5, 10, 15, 20, 25, 30, 35, 40, 60, 80, or 100 days of each other. In some embodiments, the overlap in terms of administration between the of the CD123CAR-containing cells delivery (e.g., infusion) and the end of CD19 inhibitor delivery (e.g., infusion) is at least 1, 2, 3, 4, 5, 10, 15, 20, 25, 30 minutes. In one embodiment, the CD19 inhibitor is administered prior to the CD123CAR-containing cells. In other embodiments, the CD123CAR-containing cells are administered prior to the CD19 inhibitor.

[0963] In some embodiments, the CD123CAR-containing cells are administered while the CD19 inhibitor (e.g., one or more cells that express a CD19CAR molecule) is present (e.g., cells undergoing expansion) in the subject. In other embodiments, the CD19 inhibitor (e.g., one or more cells that express a CD19CAR molecule) is administered while the CD123CAR-containing cells are present (e.g., cells undergoing expansion) in the subject.

[0964] A CD19 inhibitor includes, but is not limited to, a CD19 CAR-expressing cell, e.g., a CD19 CART cell, or an anti-CD19 antibody (e.g., an anti-CD19 mono- or bispecific antibody) or a fragment or conjugate thereof.

[0965] In one embodiment, a CAR-expressing cell described herein is administered to a subject in combination with a CD19 CAR-cell (e.g., CART cell) (e.g., CTL019, e.g., as described in WO2012/079000, incorporated herein by reference).

[0966] In other embodiments, the CAR-expressing cell described herein is administered to a subject in combination with a CD19 CAR-cell (e.g., CART cell) that includes a humanized antigen binding domain as described in WO2014/153270 (e.g., Table 3 of WO2014/153270), incorporated herein by reference.

[0967] The CD19 inhibitor (e.g., a first CD19 CAR-expressing cell) and a second CD123 CAR-expressing cell may be expressed by the same cell type or different types. For instance, in some embodiments, the cell expressing a CD19 CAR is a CD4+ T cell and the cell expressing a CD123 CAR is a CD8+ T cell, or the cell expressing a CD19 CAR is a CD8+ T cell and the cell expressing a CD123 CAR is a CD4+ T cell. In other embodiments, the cell expressing a CD19 CAR is a T cell and the cell expressing a CD123 CAR is a NK cell, or the cell expressing a CD19 CAR is a NK cell and the cell expressing a CD123 CAR is a T cell. In other embodiments, the cell expressing a CD19 CAR and the cell expressing a CD123 CAR are both NK cells or are both T cells, e.g., are both CD4+ T cells, or are both CD8+ T cells. In yet other embodiments, a single cell expresses the CD19 CAR and CD123 CAR, and this cell is, e.g., a NK cell or a T cell such as a CD4+ T cell or CD8+ T cell.

[0968] The first CAR and second CAR can comprise the same or different intracellular signaling domains. For instance, in some embodiments, the CD19 CAR comprises a CD3 zeta signaling domain and the CD123 CAR comprises a costimulatory domain, e.g., a 41BB, CD27 or CD28 costimulatory domain, while in some embodiments, the CD19 CAR comprises a costimulatory domain, e.g., a 41BB, CD27 or CD28 costimulatory domain and the CD123 CAR comprises a CD3 zeta signaling domain. In other embodiments, each of the CD19 CAR and the CD123 CAR comprises the same type of primary signaling domaine, e.g., a CD3 zeta signaling domain, but the CD19 CAR and the CD123 CAR comprise different costimulatory domains, e.g., (1) the CD19 CAR comprises a 41BB costimulatory domain and the CD123 CAR comprises a different costimulatory domain e.g., a CD27 costimulatory domain, (2) the CD19 CAR comprises a CD27 costimulatory domain and the CD123 CAR comprises a different costimulatory domain e.g., a 41BB costimulatory domain, (3) the CD19 CAR comprises a 41BB costimulatory domain and the CD123 CAR comprises a CD28 costimulatory domain, (4) the CD19 CAR comprises a CD28 costimulatory domain and the CD123 CAR comprises a different costimulatory domain e.g., a 41BB costimulatory domain, (5) the CD19 CAR comprises a CD27 costimulatory domain and the CD123 CAR comprises a CD28 costimulatory domain, or (6) the CD19 CAR comprises a CD28 costimulatory domain and the CD123 CAR comprises a CD27 costimulatory domain. In another embodiment, a cell comprises a CAR that comprises both a CD19 antigen-binding domain and a CD123 antigen-binding domain, e.g., a bispecific antibody.

[0969] In embodiments, the subject has acute myeloid leukemia (AML), e.g., a CD19 positive AML or a CD19 negative AML. In embodiments, the subject has a CD19+ lymphoma, e.g., a CD19+ Non-Hodgkin's Lymphoma (NHL), a CD19+FL, or a CD19+ DLBCL. In embodiments, the subject has a relapsed or refractory CD19+ lymphoma. In embodiments, a lymphodepleting chemotherapy is administered to the subject prior to, concurrently with, or after administration (e.g., infusion) of CD19 CART cells. In an example, the lymphodepleting chemotherapy is administered to the subject prior to administration of CD19 CART cells. For example, the lymphodepleting chemotherapy ends 1-4 days (e.g., 1, 2, 3, or 4 days) prior to CD19 CART cell infusion. In embodiments, multiple doses of CD19 CART cells are administered, e.g., as described herein. For example, a single dose comprises about 5×10⁸ CD19 CART cells. In embodiments, a lymphodepleting chemotherapy is administered to the subject prior to, concurrently with, or after administration (e.g., infusion) of a CAR-expressing cell described herein, e.g., a non-CD19 CAR-expresing cell. In embodiments, a CD19 CART is administered to the subject prior to, concurrently with, or after administration (e.g., infusion) of a non-CD19 CAR-expressing cell, e.g., a non-CD19 CAR-expressing cell described herein.

[0970] In some embodiments, a CAR-expressing cell described herein is administered to a subject in combination with a CD19 CAR-expressing cell, e.g., CTL019, e.g., as described in WO2012/079000, incorporated herein by reference, for treatment of a disease associated with the expression of CD123, e.g., a cancer described herein. Without being bound by theory, it is believed that administering a CD19 CAR-expressing cell in combination with a CAR-expressing cell improves the efficacy of a CAR-expressing cell described herein by targeting early lineage cancer cells, e.g., cancer stem cells, modulating the immune response, depleting regulatory B cells, and/or improving the tumor microenvironment. For example, a CD19 CAR-expressing cell targets cancer cells that express early lineage markers, e.g., cancer stem cells and CD19-expressing cells, while the CAR-expressing cell described herein targets cancer cells that express later lineage markers, e.g., CD123. This preconditioning approach can improve the efficacy of the CAR-expressing cell described herein. In such embodiments, the CD19 CAR-expressing cell is administered prior to, concurrently with, or after administration (e.g., infusion) of a CAR-expressing cell described herein.

[0971] In embodiments, a CAR-expressing cell described herein also expresses a CAR targeting CD19, e.g., a CD19 CAR. In an embodiment, the cell expressing a CAR described herein and a CD19 CAR is administered to a subject for treatment of a cancer described herein, e.g., AML. In an embodiment, the configurations of one or both of the CAR molecules comprise a primary intracellular signaling domain and a costimulatory signaling domain. In another embodiment, the configurations of one or both of the CAR molecules comprise a primary intracellular signaling domain and two or more, e.g., 2, 3, 4, or 5 or more, costimulatory signaling domains. In such embodiments, the CAR molecule described herein and the CD19 CAR may have the same or a different primary intracellular signaling domain, the same or different costimulatory signaling domains, or the same number or a different number of costimulatory signaling domains. Alternatively, the CAR described herein and the CD19 CAR are configured as a split CAR, in which one of the CAR molecules comprises an antigen binding domain and a costimulatory domain (e.g., 4-1BB), while the other CAR molecule comprises an antigen binding domain and a primary intracellular signaling domain (e.g., CD3 zeta).

[0972] In an embodiment, the CAR described herein and the second CAR, e.g., CD19 CAR, are on the same vector or are on two different vectors. In embodiments where the CAR described herein and the second CAR, e.g., CD19 CAR, are on the same vector, the nucleic acid sequences encoding the CAR described herein and the second CAR, e.g., CD19 CAR are in the same frame, and are separated by one or more peptide cleavage sites, e.g., P2A.

[0973] In other embodiments, the CAR-expressing cell disclosed herein is administered in combination with an anti-CD19 antibody inhibitor. In one embodiment, the anti-CD19 antibody is a humanized antigen binding domain as described in WO2014/153270 (e.g., Table 3 of WO2014/153270) incorporated herein by reference, or a conjugate thereof. Other exemplary anti-CD19 antibodies or fragments or conjugates thereof, include but are not limited to, blinatumomab, SAR3419 (Sanofi), MEDI-551 (MedImmune LLC), Combotox, DT2219ARL (Masonic Cancer Center), MOR-208 (also called XmAb-5574; MorphoSys), XmAb-5871 (Xencor), MDX-1342 (Bristol-Myers Squibb), SGN-CD19A (Seattle Genetics), and AFM11 (Affimed Therapeutics). See, e.g., Hammer. MAbs. 4.5(2012): 571-77. Blinatomomab is a bispecific antibody comprised of two scFvs—one that binds to CD19 and one that binds to CD3. Blinatomomab directs T cells to attack cancer cells. See, e.g., Hammer et al.; Clinical Trial Identifier No. NCT00274742 and NCT01209286. MEDI-551 is a humanized anti-CD19 antibody with a Fc engineered to have enhanced antibody-dependent cell-mediated cytotoxicity (ADCC). See, e.g., Hammer et al.; and Clinical Trial Identifier No. NCT01957579. Combotox is a mixture of immunotoxins that bind to CD19 and CD22. The immunotoxins are made up of scFv antibody fragments fused to a deglycosylated ricin A chain. See, e.g., Hammer et al.; and Herrera et al. J. Pediatr. Hematol. Oncol. 31.12(2009):936-41; Schindler et al. Br. J. Haematol. 154.4(2011):471-6. DT2219ARL is a bispecific immunotoxin targeting CD19 and CD22, comprising two scFvs and a truncated diphtheria toxin. See, e.g., Hammer et al.; and Clinical Trial Identifier No. NCT00889408. SGN-CD19A is an antibody-drug conjugate (ADC) comprised of an anti-CD19 humanized monoclonal antibody linked to a synthetic cytotoxic cell-killing agent, monomethyl auristatin F (MMAF). See, e.g., Hammer et al.; and Clinical Trial Identifier Nos. NCT01786096 and NCT01786135. SAR3419 is an anti-CD19 antibody-drug conjugate (ADC) comprising an anti-CD19 humanized monoclonal antibody conjugated to a maytansine derivative via a cleavable linker. See, e.g., Younes et al. J. Clin. Oncol. 30.2(2012): 2776-82; Hammer et al.; Clinical Trial Identifier No. NCT00549185; and Blanc et al. Clin Cancer Res. 2011; 17:6448-58. XmAb-5871 is an Fc-engineered, humanized anti-CD19 antibody. See, e.g., Hammer et al. MDX-1342 is a human Fc-engineered anti-CD19 antibody with enhanced ADCC. See, e.g., Hammer et al. In embodiments, the antibody molecule is a bispecific anti-CD19 and anti-CD3 molecule. For instance, AFM11 is a bispecific antibody that targets CD19 and CD3. See, e.g., Hammer et al.; and Clinical Trial Identifier No. NCT02106091. In some embodiments, an anti-CD19 antibody described herein is conjugated or otherwise bound to a therapeutic agent, e.g., a chemotherapeutic agent, peptide vaccine (such as that described in Izumoto et al. 2008 J Neurosurg 108:963-971), immunosuppressive agent, or immunoablative agent, e.g., cyclosporin, azathioprine, methotrexate, mycophenolate, FK506, CAMPATH, anti-CD3 antibody, cytoxin, fludarabine, rapamycin, mycophenolic acid, steroid, FR901228, or cytokine.

Combination with a Low Dose of an mTOR Inhibitor

[0974] Methods described herein use low, immune enhancing, doses of mTOR inhibitors, e.g., allosteric mTOR inhibitors, including rapalogs such as RAD001. Administration of a low, immune enhancing, dose of an mTOR inhibitor (e.g., a dose that is insufficient to completely suppress the immune system, but sufficient to improve immune function) can optimize the performance of immune effector cells, e.g., T cells or CAR-expressing cells, in the subject. Methods for measuring mTOR inhibition, dosages, treatment regimens, and suitable pharmaceutical compositions are described in U.S. Patent Application No. 2015/01240036, hereby incorporated by reference.

[0975] Exemplary mTOR inhibitors, methods for measuring mTOR inhibition, dosages, treatment regimens, and suitable pharmaceutical compositions are also described on pages 313-320 of WO 2016/164731 filed on Apr. 8 2016, which is hereby incorporated by reference in its entirety.

[0976] mTOR inhibitors useful according to the present invention also include prodrugs, derivatives, pharmaceutically acceptable salts, or analogs thereof of any of the foregoing. mTOR inhibitors, such as RAD001, may be formulated for delivery based on well-established methods in the art based on the particular dosages described herein. In particular, U.S. Pat. No. 6,004,973 (incorporated herein by reference) provides examples of formulations useable with the mTOR inhibitors described herein.

### Methods and Biomarkers for Evaluating CAR-Effectiveness or Sample Suitability

[0977] In another aspect, the invention features a method of evaluating or monitoring the effectiveness of a CAR-expressing cell therapy (e.g., a CD123 CAR therapy), in a subject (e.g., a subject having a cancer, e.g., a hematological cancer), or the suitability of a sample (e.g., an apheresis sample) for a CAR therapy (e.g., a CD123 CAR therapy). The method includes acquiring a value of effectiveness to the CAR therapy, or sample suitability, wherein said value is indicative of the effectiveness or suitability of the CAR-expressing cell therapy. In embodiments, the method is performed as described in WO2016/057705, incorporated herein by reference.

### Biopolymer Delivery Methods

[0978] In some embodiments, one or more CAR-expressing cells as disclosed herein can be administered or delivered to the subject via a biopolymer scaffold, e.g., a biopolymer implant. Biopolymer scaffolds can support or enhance the delivery, expansion, and/or dispersion of the CAR-expressing cells described herein. A biopolymer scaffold comprises a biocompatible (e.g., does not substantially induce an inflammatory or immune response) and/or a biodegradable polymer that can be naturally occurring or synthetic.

[0979] Examples of suitable biopolymers include, but are not limited to, agar, agarose, alginate, alginate/calcium phosphate cement (CPC), beta-galactosidase (β-GAL), (1,2,3,4,6-pentaacetyl a-D-galactose), cellulose, chitin, chitosan, collagen, elastin, gelatin, hyaluronic acid collagen, hydroxyapatite, poly(3-hydroxybutyrate-co-3-hydroxy-hexanoate) (PHBHHx), poly(lactide), poly(caprolactone) (PCL), poly(lactide-co-glycolide) (PLG), polyethylene oxide (PEO), poly(lactic-co-glycolic acid) (PLGA), polypropylene oxide (PPO), polyvinyl alcohol) (PVA), silk, soy protein, and soy protein isolate, alone or in combination with any other polymer composition, in any concentration and in any ratio. The biopolymer can be augmented or modified with adhesion- or migration-promoting molecules, e.g., collagen-mimetic peptides that bind to the collagen receptor of lymphocytes, and/or stimulatory molecules to enhance the delivery, expansion, or function, e.g., anti-cancer activity, of the cells to be delivered. The biopolymer scaffold can be an injectable, e.g., a gel or a semi-solid, or a solid composition.

[0980] In some embodiments, CAR-expressing cells described herein are seeded onto the biopolymer scaffold prior to delivery to the subject. In embodiments, the biopolymer scaffold further comprises one or more additional therapeutic agents described herein (e.g., another CAR-expressing cell, an antibody, or a small molecule) or agents that enhance the activity of a CAR-expressing cell, e.g., incorporated or conjugated to the biopolymers of the scaffold. In embodiments, the biopolymer scaffold is injected, e.g., intratumorally, or surgically implanted at the tumor or within a proximity of the tumor sufficient to mediate an anti-tumor effect. Additional examples of biopolymer compositions and methods for their delivery are described in Stephan et al., Nature Biotechnology, 2015, 33:97-101; and WO2014/110591.

### Pharmaceutical Compositions and Treatments

[0981] Pharmaceutical compositions of the present invention may comprise a CAR-expressing cell, e.g., a plurality of CAR-expressing cells, as described herein, in combination with one or more pharmaceutically or physiologically acceptable carriers, diluents or excipients. Such compositions may comprise buffers such as neutral buffered saline, phosphate buffered saline and the like; carbohydrates such as glucose, mannose, sucrose or dextrans, mannitol; proteins; polypeptides or amino acids such as glycine; antioxidants; chelating agents such as EDTA or glutathione; adjuvants (e.g., aluminum hydroxide); and preservatives. Compositions of the present invention are in one aspect formulated for intravenous administration.

[0982] Pharmaceutical compositions of the present invention may be administered in a manner appropriate to the disease to be treated (or prevented). The quantity and frequency of administration will be determined by such factors as the condition of the patient, and the type and severity of the patient's disease, although appropriate dosages may be determined by clinical trials.

[0983] In one embodiment, the pharmaceutical composition is substantially free of, e.g., there are no detectable levels of a contaminant, e.g., selected from the group consisting of endotoxin, mycoplasma, replication competent lentivirus (RCL), p24, VSV-G nucleic acid, HIV gag, residual anti-CD3/anti-CD28 coated beads, mouse antibodies, pooled human serum, bovine serum albumin, bovine serum, culture media components, vector packaging cell or plasmid components, a bacterium and a fungus. In one embodiment, the bacterium is at least one selected from the group consisting of Alcaligenes faecalis, Candida albicans, Escherichia coli, Haemophilus influenza, Neisseria meningitides, Pseudomonas aeruginosa, Staphylococcus aureus, Streptococcus pneumonia, and Streptococcus pyogenes group A.

[0984] When “an immunologically effective amount,” “an anti-tumor effective amount,” “a tumor-inhibiting effective amount,” or “therapeutic amount” is indicated, the precise amount of the compositions of the present invention to be administered can be determined by a physician with consideration of individual differences in age, weight, tumor size, extent of infection or metastasis, and condition of the patient (subject). It can generally be stated that a pharmaceutical composition comprising the T cells described herein may be administered at a dosage of 10⁴ to 10⁹ cells/kg body weight, in some instances 10⁵ to 10⁶ cells/kg body weight, including all integer values within those ranges. T cell compositions may also be administered multiple times at these dosages.

[0985] In some embodiments, a dose of CAR cells (e.g., CD123 CAR cells or CD19 CAR cells) comprises about 1×10⁶, 1.1×10⁶, 2×10⁶, 3.6×10⁶, 5×10⁶, 1×10⁷, 1.8×10⁷, 2×10⁷, 5×10⁷, 1×10⁸, 2×10⁸, or 5×10⁸ cells/kg. In some embodiments, a dose of CAR cells (e.g., e.g., CD123 CAR cells or CD19 CAR cells) comprises at least about 1×10⁶, 1.1×10⁶, 2×10⁶, 3.6×10⁶, 5×10⁶, 1×10⁷, 1.8×10⁷, 2×10⁷, 5×10⁷, 1×10⁸, 2×10⁸, or 5×10⁸ cells/kg. In some embodiments, a dose of CAR cells (e.g., CD123 CAR cells or CD19 CAR cells) comprises up to about 1×10⁶, 1.1×10⁶, 2×10⁶, 3.6×10⁶, 5×10⁶, 1×10⁷, 1.8×10⁷, 2×10⁷, 5×10⁷, 1×10⁸, 2×10⁸, or 5×10⁸ cells/kg. In some embodiments, a dose of CAR cells (e.g., CD123 CAR cells or CD19 CAR cells) comprises about 1.1×10⁶-1.8×10⁷ cells/kg. In some embodiments, a dose of CAR cells (e.g., CD123 CAR cells or CD19 CAR cells) comprises about 1×10⁷, 2×10⁷, 5×10⁷, 1×10⁸, 2×10⁸, 5×10⁸, 1×10⁹, 2×10⁹, or 5×10⁹ cells. In some embodiments, a dose of CAR cells (e.g., CD123 CAR cells or CD19 CAR cells) comprises at least about 1×10⁷, 2×10⁷, 5×10⁷, 1×10⁸, 2×10⁸, 5×10⁸, 1×10⁹, 2×10⁹, or 5×10⁹ cells. In some embodiments, a dose of CAR cells (e e.g., CD123 CAR cells or CD19 CAR cells) comprises up to about 1×10⁷, 2×10⁷, 5×10⁷, 1×10⁸, 2×10⁸, 5×10⁸, 1×10⁹, 2×10⁹, or 5×10⁹ cells.

[0986] The cells can be administered by using infusion techniques that are commonly known in immunotherapy (see, e.g., Rosenberg et al., New Eng. J. of Med. 319:1676, 1988).

[0987] In certain aspects, it may be desired to administer activated T cells to a subject and then subsequently redraw blood (or have an apheresis performed), activate T cells therefrom according to the present invention, and reinfuse the patient with these activated and expanded T cells. This process can be carried out multiple times every few weeks. In certain aspects, T cells can be activated from blood draws of from 10 cc to 400 cc. In certain aspects, T cells are activated from blood draws of 20 cc, 30 cc, 40 cc, 50 cc, 60 cc, 70 cc, 80 cc, 90 cc, or 100 cc.

[0988] The administration of the subject compositions may be carried out in any convenient manner, including by aerosol inhalation, injection, ingestion, transfusion, implantation or transplantation. The compositions described herein may be administered to a patient trans arterially, subcutaneously, intradermally, intratumorally, intranodally, intramedullary, intramuscularly, by intravenous (i.v.) injection, or intraperitoneally. In one aspect, the CAR-expressing cell (e.g., T cell or NK cell) compositions of the present invention are administered to a patient by intradermal or subcutaneous injection. In one aspect, the the CAR-expressing cell (e.g., T cell or NK cell) compositions of the present invention are administered by i.v. injection. The compositions of the CAR-expressing cell (e.g., T cell or NK cell) may be injected directly into a tumor, lymph node, or site of infection.

[0989] In a particular exemplary aspect, subjects may undergo leukapheresis, wherein leukocytes are collected, enriched, or depleted ex vivo to select and/or isolate the cells of interest, e.g., immune effector cells (e.g., T cells or NK cells). These immune effector cell (e.g., T cell or NK cell) isolates may be expanded by methods known in the art and treated such that one or more CAR constructs of the invention may be introduced, thereby creating a CAR-expressing cell (e.g., CAR T cell or CAR-expressing NK cell) of the invention. Subjects in need thereof may subsequently undergo standard treatment with high dose chemotherapy followed by peripheral blood stem cell transplantation. In certain aspects, following or concurrent with the transplant, subjects receive an infusion of the expanded CAR-expressing cell (e.g., CAR T cell or CAR-expressing NK cell) of the present invention. In an additional aspect, expanded cells are administered before or following surgery.

[0990] The dosage of the above treatments to be administered to a patient will vary with the precise nature of the condition being treated and the recipient of the treatment. The scaling of dosages for human administration can be performed according to art-accepted practices. The dose for CAMPATH, for example, will generally be in the range 1 to about 100 mg for an adult patient, usually administered daily for a period between 1 and 30 days. The preferred daily dose is 1 to 10 mg per day although in some instances larger doses of up to 40 mg per day may be used (described in U.S. Pat. No. 6,120,766).

[0991] In one embodiment, the CAR is introduced into immune effector cells (e.g., T cells or NK cells), e.g., using in vitro transcription, and the subject (e.g., human) receives an initial administration of a CAR-expressing cell (e.g., CAR T cell or CAR-expressing NK cell) of the invention, and one or more subsequent administrations of the CAR-expressing cell (e.g., CAR T cell or CAR-expressing NK cell) of the invention, wherein the one or more subsequent administrations are administered less than 15 days, e.g., 14, 13, 12, 11, 10, 9, 8, 7, 6, 5, 4, 3, or 2 days after the previous administration. In one embodiment, more than one administration of the CAR-expressing cell (e.g., CAR T cell or CAR-expressing NK cell) of the invention are administered to the subject (e.g., human) per week, e.g., 2, 3, or 4 administrations of the CAR-expressing cell (e.g., CAR T cell or CAR-expressing NK cell) of the invention are administered per week. In one embodiment, the subject (e.g., human subject) receives more than one administration of the CAR-expressing cell (e.g., CAR T cell or CAR-expressing NK cell) per week (e.g., 2, 3 or 4 administrations per week) (also referred to herein as a cycle), followed by a week of no CAR-expressing cell (e.g., CAR T cell or CAR-expressing NK cell)administrations, and then one or more additional administration of the CAR-expressing cell (e.g., CAR T cell or CAR-expressing NK cell) (e.g., more than one administration of the CAR-expressing cell (e.g., CAR T cell or CAR-expressing NK cell)per week) is administered to the subject. In another embodiment, the subject (e.g., human subject) receives more than one cycle of CAR-expressing cell (e.g., CAR T cell or CAR-expressing NK cell), and the time between each cycle is less than 10, 9, 8, 7, 6, 5, 4, or 3 days. In one embodiment, the CAR-expressing cell (e.g., CAR T cell or CAR-expressing NK cell) are administered every other day for 3 administrations per week. In one embodiment, the CAR-expressing cell (e.g., CAR T cell or CAR-expressing NK cell) of the invention are administered for at least two, three, four, five, six, seven, eight or more weeks.

[0992] In one aspect, CAR-expressing cell (e.g., CAR T cell or CAR-expressing NK cell) (e.g., CD123 CAR-expressing cell) is generated using lentiviral viral vectors, such as lentivirus. CAR-expressing cell (e.g., CAR T cell or CAR-expressing NK cell) generated that way will have stable CAR expression.

[0993] In one aspect, CAR-expressing cells, e.g., CARTs or CAR-expressing NK cells, are generated using a viral vector such as a gammaretroviral vector, e.g., a gammaretroviral vector described herein. CAR-expressing cells, e.g., CARTs or CAR-expressing NK cells, generated using these vectors can have stable CAR expression.

[0994] In one aspect, the CAR-expressing cell (e.g., CAR T cell or CAR-expressing NK cell) transiently express CAR vectors for 4, 5, 6, 7, 8, 9, 10, 11, 12, 13, 14, 15 days after transduction. Transient expression of CARs can be effected by RNA CAR vector delivery. In one aspect, the CAR RNA is transduced into the cell (e.g., T cell or NK cell) by electroporation.

[0995] A potential issue that can arise in patients being treated using transiently expressing CAR cell (e.g., CAR T cell or CAR-expressing NK cell) (particularly with murine scFv bearing CARs) is anaphylaxis after multiple treatments.

[0996] Without being bound by this theory, it is believed that such an anaphylactic response might be caused by a patient developing humoral anti-CAR response, i.e., anti-CAR antibodies having an anti-IgE isotype. It is thought that a patient's antibody producing cells undergo a class switch from IgG isotype (that does not cause anaphylaxis) to IgE isotype when there is a ten to fourteen day break in exposure to antigen.

[0997] If a patient is at high risk of generating an anti-CAR antibody response during the course of transient CAR therapy (such as those generated by RNA transductions), CAR-expressing cell (e.g., CAR T cell or CAR-expressing NK cell)infusion breaks should not last more than ten to fourteen days.

### Cytokine Release Syndrome (CRS)

[0998] Cytokine release syndrome (CRS) is a potentially life-threatening cytokine-associated toxicity that can occur as a result of cancer immunotherapy, e.g., cancer antibody therapies or T cell immunotherapies (e.g., CAR T cells). CRS results from high-level immune activation when large numbers of lymphocytes and/or myeloid cells release inflammatory cytokines upon activation. The severity of CRS and the timing of onset of symptoms can vary depending on the magnitude of immune cell activation, the type of therapy administered, and/or the extent of tumor burden in a subject. In the case of T-cell therapy for cancer, symptom onset is typically days to weeks after administration of the T-cell therapy, e.g., when there is peak in vivo T-cell expansion. See, e.g., Lee et al. Blood. 124.2(2014): 188-95.

[0999] Symptoms of CRS can include neurologic toxicity, disseminated intravascular coagulation, cardiac dysfunction, adult respiratory distress syndrome, renal failure, and/or hepatic failure. For example, symptoms of CRS can include fever with or without rigors, fatigue, malaise, myalgias, vomiting, headache, nausea, anorexia, arthalgias, diarrhea, rash, hypoxemia, tachypnea, hypotension, widened pulse pressure, potentially diminished cardiac output (late), increased cardiac output (early), azotemia, hypofibrinogenemia with or without bleeding, elevated D-dimer, hyperbilirubinemia, transaminitis, confusion, delirium, mental status changes, hallucinations, tremor, seizures, altered gait, word finding difficulty, frank aphasia, or dymetria.

[1000] IL-6 is thought to be a mediator of CRS toxicity. See, e.g., id. High IL-6 levels may initiate a proinflammatory IL-6 signaling cascade, leading to one or more of the CRS symptoms. In some cases, the level of C-reactive protein (CRP) (a biomolecule produced by the liver, e.g., in response to IL-6) can be a measure of IL-6 activity. In some cases, CRP levels may increase several fold (e.g., several logs) during CRS. CRP levels can be measured using methods described herein, and/or standard methods available in the art.

### CRS Grading

[1001] In some embodiments, CRS can be graded in severity from 1-5 as follows. Grades 1-3 are less than severe CRS. Grades 4-5 are severe CRS. For Grade 1 CRS, only symptomatic treatment is needed (e.g., nausea, fever, fatigue, myalgias, malaise, headache) and symptoms are not life threatening. For Grade 2 CRS, the symptoms require moderate intervention and generally respond to moderate intervention. Subjects having Grade 2 CRS develop hypotension that is responsive to either fluids or one low-dose vasopressor; or they develop grade 2 organ toxicity or mild respiratory symptoms that are responsive to low flow oxygen (<40% oxygen). In Grade 3 CRS subjects, hypotension generally cannot be reversed by fluid therapy or one low-dose vasopressor. These subjects generally require more than low flow oxygen and have grade 3 organ toxicity (e.g., renal or cardiac dysfunction or coagulopathy) and/or grade 4 transaminitis. Grade 3 CRS subjects require more aggressive intervention, e.g., oxygen of 40% or higher, high dose vasopressor(s), and/or multiple vasopressors. Grade 4 CRS subjects suffer from immediately life-threatening symptoms, including grade 4 organ toxicity or a need for mechanical ventilation. Grade 4 CRS subjects generally do not have transaminitis. In Grade 5 CRS subjects, the toxicity causes death. For example, criteria for grading CRS is provided herein as Table 20A. Unless otherwise specified, CRS as used herein refers to CRS according to the criteria of Table 20A.

TABLE 20A
CRS grading

| | |
|---|---|
| Gr1 | Supportive care only |
| Gr2 | IV therapies +/− hospitalization. |
| Gr3 | Hypotension requiring IV fluids or low-dose vasoactives or |
| | hypoxemia requiring oxygen, CPAP, or BIPAP. |
| Gr4 | Hypotension requiring high-dose vasoactives or hypoxemia |
| | requiring mechanical ventilation. |
| Gr 5 | Death |

### CRS Therapies

[1002] Therapies for CRS include IL-6 inhibitor or IL-6 receptor (IL-6R) inhibitors (e.g., tocilizumab or siltuximab), sgp130 blockers, vasoactive medications, corticosteroids, immunosuppressive agents, and mechanical ventilation. Exemplary therapies for CRS are described in International Application WO2014011984, which is hereby incorporated by reference.

[1003] Tocilizumab is a humanized, immunoglobulin Glkappa anti-human IL-6R monoclonal antibody. See, e.g., id. Tocilizumab blocks binding of IL-6 to soluble and membrane bound IL-6 receptors (IL-6Rs) and thus inhibitos classical and trans-IL-6 signaling. In embodiments, tocilizumab is administered at a dose of about 4-12 mg/kg, e.g., about 4-8 mg/kg for adults and about 8-12 mg/kg for pediatric subjects, e.g., administered over the course of 1 hour.

[1004] In some embodiments, the CRS therapeutic is an inhibitor of IL-6 signalling, e.g., an inhibitor of IL-6 or IL-6 receptor. In one embodiment, the inhibitor is an anti-IL-6 antibody, e.g., an anti-IL-6 chimeric monoclonal antibody such as siltuximab. In other embodiments, the inhibitor comprises a soluble gp130 or a fragment thereof that is capable of blocking IL-6 signalling. In some embodiments, the sgp130 or fragment thereof is fused to a heterologous domain, e.g., an Fc domain, e.g., is a gp130-Fc fusion protein such as FE301. In embodiments, the inhibitor of IL-6 signalling comprises an antibody, e.g., an antibody to the IL-6 receptor, such as sarilumab, olokizumab (CDP6038), elsilimomab, sirukumab (CNTO 136), ALD518/BMS-945429, ARGX-109, or FM101. In some embodiments, the inhibitor of IL-6 signalling comprises a small molecule such as CPSI-2364.

[1005] Exemplary vasoactive medications include but are not limited to angiotensin-11, endothelin-1, alpha adrenergic agonists, rostanoids, phosphodiesterase inhibitors, endothelin antagonists, inotropes (e.g., adrenaline, dobutamine, isoprenaline, ephedrine), vasopressors (e.g., noradrenaline, vasopressin, metaraminol, vasopressin, methylene blue), inodilators (e.g., milrinone, levosimendan), and dopamine.

[1006] Exemplary vasopressors include but are not limited to norepinephrine, dopamine, phenylephrine, epinephrine, and vasopressin. In some embodiments, a high-dose vasopressor includes one or more of the following: norpepinephrine monotherapy at ≥20 ug/min, dopamine monotherapy at ≥10 ug/kg/min, phenylephrine monotherapy at ≥200 ug/min, and/or epinephrine monotherapy at ≥10 ug/min. In some embodiments, if the subject is on vasopressin, a high-dose vasopressor includes vasopressin+norepinephrine equivalent of ≥10 ug/min, where the norepinephrine equivalent dose=[norepinephrine (ug/min)]+[dopamine (ug/kg/min)/2]+[epinephrine (ug/min)]+[phenylephrine (ug/min)/10]. In some embodiments, if the subject is on combination vasopressors (not vasopressin), a high-dose vasopressor includes norepinephrine equivalent of ≥20 ug/min, where the norepinephrine equivalent dose=[norepinephrine (ug/min)]+[dopamine (ug/kg/min)/2]+[epinephrine (ug/min)]+[phenylephrine (ug/min)/10]. See e.g., Id.

[1007] In some embodiments, a low-dose vasopressor is a vasopressor administered at a dose less than one or more of the doses listed above for high-dose vasopressors.

[1008] Exemplary corticosteroids include but are not limited to dexamethasone, hydrocortisone, and methylprednisolone. In embodiments, a dose of dexamethasone of 0.5 mg/kg is used. In embodiments, a maximum dose of dexamethasone of 10 mg/dose is used. In embodiments, a dose of methylprednisolone of 2 mg/kg/day is used.

[1009] Exemplary immunosuppressive agents include but are not limited to an inhibitor of TNFα or an inhibitor of IL-1. In embodiments, an inhibitor of TNFα comprises an anti-TNFα antibody, e.g., monoclonal antibody, e.g., infliximab. In embodiments, an inhibitor of TNFα comprises a soluble TNFα receptor (e.g., etanercept). In embodiments, an IL-1 or IL-1R inhibitor comprises anakinra.

[1010] In some embodiments, the subject at risk of developing severe CRS is administered an anti-IFN-gamma or anti-sIL2Ra therapy, e.g., an antibody molecule directed against IFN-gamma or sIL2Ra.

[1011] In embodiments, for a subject who has received a therapeutic antibody molecule such as blinatumomab and who has CRS or is at risk of developing CRS, the therapeutic antibody molecule is administered at a lower dose and/or a lower frequency, or administration of the therapeutic antibody molecule is halted.

[1012] In embodiments, a subject who has CRS or is at risk of developing CRS is treated with a fever reducing medication such as acetaminophen.

[1013] In embodiments, a subject herein is administered or provided one or more therapies for CRS described herein, e.g., one or more of IL-6 inhibitors or IL-6 receptor (IL-6R) inhibitors (e.g., tocilizumab), vasoactive medications, corticosteroids, immunosuppressive agents, or mechanical ventilation, in any combination, e.g., in combination with a CAR-expressing cell described herein.

[1014] In embodiments, a subject at risk of developing CRS (e.g., severe CRS) (e.g., identified as having a high risk status for developing severe CRS) is administered one or more therapies for CRS described herein, e.g., one or more of IL-6 inhibitor or IL-6 receptor (IL-6R) inhibitors (e.g., tocilizumab), vasoactive medications, corticosteroids, immunosuppressive agents, or mechanical ventilation, in any combination, e.g., in combination with a CAR-expressing cell described herein.

[1015] In embodiments, a subject herein (e.g., a subject at risk of developing severe CRS or a subject identified as at risk of developing severe CRS) is transferred to an intensive care unit. In some embodiments, a subject herein (e.g., a subject at risk of developing severe CRS or a subject identified as at risk of developing severe CRS) is monitored for one ore more symptoms or conditions associated with CRS, such as fever, elevated heart rate, coagulopathy, MODS (multiple organ dysfunction syndrome), cardiovascular dysfunction, distributive shock, cardiomyopathy, hepatic dysfunction, renal dysfunction, encephalopathy, clinical seizures, respiratory failure, or tachycardia. In some embodiments, the methods herein comprise administering a therapy for one of the symptoms or conditions associated with CRS. For instance, in embodiments, e.g., if the subject develops coagulopathy, the method comprises administering cryoprecipitate. In some embodiments, e.g., if the subject develops cardiovascular dysfunction, the method comprises administering vasoactive infusion support. In some embodiments, e.g., if the subject develops distributive shock, the method comprises administering alpha-agonist therapy. In some embodiments, e.g., if the subject develops cardiomyopathy, the method comprises administering milrinone therapy. In some embodiments, e.g., if the subject develops respiratory failure, the method comprises performing mechanical ventilation (e.g., invasive mechanical ventilation or noninvasive mechanical ventilation). In some embodiments, e.g., if the subject develops shock, the method comprises administering crystalloid and/or colloid fluids.

[1016] In embodiments, the CAR-expressing cell is administered prior to, concurrently with, or subsequent to administration of one or more therapies for CRS described herein, e.g., one or more of IL-6 inhibitor or IL-6 receptor (IL-6R) inhibitors (e.g., tocilizumab), vasoactive medications, corticosteroids, immunosuppressive agents, or mechanical ventilation. In embodiments, the CAR-expressing cell is administered within 2 weeks (e.g., within 2 or 1 week, or within 14 days, e.g., within 14, 13, 12, 11, 10, 9, 8, 7, 6, 5, 4, 3, 2, 1 day or less) of administration of one or more therapies for CRS described herein, e.g., one or more of IL-6 inhibitors or IL-6 receptor (IL-6R) inhibitors (e.g., tocilizumab), vasoactive medications, corticosteroids, immunosuppressive agents, or mechanical ventilation. In embodiments, the CAR-expressing cell is administered at least 1 day (e.g., at least 1, 2, 3, 4, 5, 6, 7, 8, 9, 10, 11, 12, 13, 14, 15, 16, 17, 18, 19, 20, 1, week, 2 weeks, 3 weeks, 4 weeks, 1 month, 2 months, 3 months, 3 months, or more) before or after administration of one or more therapies for CRS described herein, e.g., one or more of IL-6 inhibitors or IL-6 receptor (IL-6R) inhibitors (e.g., tocilizumab), vasoactive medications, corticosteroids, immunosuppressive agents, or mechanical ventilation.

[1017] In embodiments, a subject herein (e.g., a subject at risk of developing severe CRS or a subject identified as at risk of developing severe CRS) is administered a single dose of an IL-6 inhibitor or IL-6 receptor (IL-6R) inhibitor (e.g., tocilizumab). In embodiments, the subject is administered a plurality of doses (e.g., 2, 3, 4, 5, 6, or more doses) of an IL-6 inhibitor or IL-6 receptor (IL-6R) inhibitor (e.g., tocilizumab).

[1018] In embodiments, a subject at low or no risk of developing CRS (e.g., severe CRS) (e.g., identified as having a low risk status for developing severe CRS) is not administered a therapy for CRS described herein, e.g., one or more of IL-6 inhibitor or IL-6 receptor (IL-6R) inhibitors (e.g., tocilizumab), vasoactive medications, corticosteroids, immunosuppressive agents, or mechanical ventilation.

[1019] In embodiments, a subject is determined to be at high risk of developing severe CRS by using an evaluation or prediction method described herein. In embodiments, a subject is determined to be at low risk of developing severe CRS by using an evaluation or prediction method described herein.

### Identifying a Subject at Risk for CRS

### Use of Biomarkers to Evaluate (e.g., Predict) CRS Severity

[1020] In embodiments, one or more biomarkers are used to evaluate (e.g., predict) CRS severity. Exemplary biomarkers used to evaluate (e.g., predict) CRS severity include cytokines such as sTNFR2, IP10, sIL1R2, sTNFR1, M1G, VEGF, sILR1, TNFα, IFNα, GCSF, sRAGE, IL4, IL10, IL1R1, IFN-γ, IL6, IL8, sIL2Rα, sgp130, sIL6R, MCP1, MIP1α, MIP1β, and GM-CSF. In embodiments, one or more (e.g., two or more, or three or more) of the cytokines, sTNFR2, IP10, sIL1R2, sTNFR1, M1G, VEGF, sILR1, TNFα, IFNα, GCSF, sRAGE, IL4, IL10, IL1R1, IFN-γ, IL6, IL8, sIL2Rα, sgp130, sIL6R, MCP1, MIP1α, MIP1β, and GM-CSF, are used to evaluate (e.g., predict) CRS severity. In embodiments, one or more (e.g., two or more, or three or more) of the cytokines, IFN-γ, IL6, IL8, sIL2Rα, sgp130, sIL6R, MCP1, MIP1α, MIP1β, and GM-CSF, are used to evaluate (e.g., predict) CRS severity. In embodiments, one or more (e.g., both) of the cytokines, IFN-γ and sgp130, are used to evaluate (e.g., predict) CRS severity, e.g., in an adult or pediatric subject. In embodiments, one or more (e.g., two or more, or all three) of the cytokines, IFN-γ, sgp130, and IL1Ra, are used to evaluate (e.g., predict) CRS severity, e.g., in an adult or pediatric subject. In embodiments, one or more (e.g., two or more, or all three) of the cytokines, IFN-γ, IL13, and MIP1α are used to evaluate (e.g., predict) CRS severity, e.g., in a pediatric subject. In embodiments, one or more (e.g., two or more, or all three) of the cytokines, sgp130, MCP1, and eotaxin are used to evaluate (e.g., predict) CRS severity, e.g., in a pediatric or adult subject. In embodiments, one or more (e.g., two or more, or all three) of the cytokines, IL2, eotaxin, and sgp130 are used to evaluate (e.g., predict) CRS severity, e.g., in a pediatric or adult subject. In embodiments, one or more (e.g., two or more, or all three) of the cytokines, IFN-gamma, IL2, and eotaxin are used to evaluate (e.g., predict) CRS severity, e.g., in a pediatric subject. In embodiments, one or more (e.g., both) of IL10 and disease burden are used to evaluate (e.g., predict) CRS severity, e.g., in a pediatric subject. In embodiments, one or more (e.g., both) of the cytokines, IFN-gamma and IL-13 eotaxin are used to evaluate (e.g., predict) CRS severity, e.g., in a pediatric subject. In embodiments, one or more (e.g., two or more, or all three) of the cytokines, IFN-gamma, IL-13, and MIP1-alpha, are used to evaluate (e.g., predict) CRS severity, e.g., in a pediatric subject. In embodiments, one or more (e.g., both) of the cytokines IFN-gamma and MIP1-alpha, are used to evaluate (e.g., predict) CRS severity, e.g., in a pediatric subject.

[1021] Exemplary biomarkers used to evaluate (e.g., predict) CRS severity can also include disease burden assessments, e.g., the extent of disease (e.g., cancer) in a subject. For example, a disease burden assessment can be made by determining the level of disease (e.g., cancer) in a biological sample from a subject (e.g., bone marrow of a subject). For example, a high disease burden is indicated by the presence of at least 25% (e.g., at least 25%, 30%, 35%, 40%, 45%, 50%, 55%, 60%, 70%, 80%, 90% or higher) bone marrow blasts (e.g., determined by morphology on an aspirate or biopsy, a flow assay on an aspirate or biopsy, and/or by MRD). In some embodiments, a high disease burden is indicated by the presence of at least 50% bone marrow blasts. For example, a low disease burden is indicated by the presence of less than 25% (e.g., 24% or less, e.g., 24%, 23%, 22%, 21%, 20%, 15%, 10%, 5% or less) bone marrow blasts (e.g., determined by morphology on an aspirate or biopsy, a flow assay on an aspirate or biopsy, and/or by MRD). In some embodiments, a low disease burden is indicated by the presence of less than 0.1%, 1%, 5%, 25%, or 50% bone marrow blasts. In some embodiments, the cancer is ALL. In embodiments, the cancer is AML.

[1022] In embodiments, one or more cytokines in combination with a disease burden assessment is used to evaluate (e.g., predict) CRS severity, e.g., in a pediatric subject. In embodiments, one or more of the cytokines, spg130 and IFN-γ, in combination with bone marrow disease (e.g., cancer) are used to evaluate (e.g., predict) CRS severity, e.g., in a pediatric subject. In embodiments, disease burden assessments, e.g., from bone marrow, e.g., for cancer, can be determined used methods described herein, e.g., as described in Borowitz et al. Blood. 2008; 111(12):5477-85; or Weir et al. Leukemia. 1999; 13(4):558-67.

[1023] Another exemplary biomarker used to evaluate (e.g., predict) CRS severity includes C-reactive protein (CRP) level or activity. In embodiments, a subject at low risk of severe CRS is identified as having a CRP level of less than 7 mg/dL (e.g., 7, 6.8, 6, 5, 4, 3, 2, 1 mg/dL or less). In embodiments, a subject at high risk of severe CRS is identified as having a greater level of CRP in a sample (e.g., a blood sample) compared to a subject at low risk of severe CRS or compared to a control level or activity. In embodiments, the greater level or activity is at least 2-fold greater (e.g., at least 2, 3, 4, 5, 6, 7, 8, 9, 10, 15, 20, 25, 30, 40, 50, 100, 500, 1000-fold or more greater) compared to a subject at low risk of severe CRS or compared to a control level or activity.

[1024] In embodiments, the biomarkers described herein are used to predict CRS severity in a subject early on after administration with a CAR T cell (e.g., a CAR T cell described herein, e.g., a CD19 CAR-expressing cell therapy described herein such as, e.g., CTL019; or a CD123 CAR-expressing cell). In embodiments, the biomarkers described herein are used to predict CRS severity in a subject within 2 weeks, e.g., within 1 week or less after administration with the CAR T cell. In embodiments, the biomarkers described herein are used to predict CRS severity in a subject within 10 days (e.g., 10, 9, 8, 7, 6, 5, 4, 3, 2, 1 day or less after administration with the CAR T cell. In embodiments, the biomarkers described herein are used to predict CRS severity in a subject within 1-10 days (e.g., within 1-10, 1-9, 1-8, 1-7, 1-6, 1-5, 1-4, 1-3, 1-2, or 1 day after administration with the CAR T cell. In embodiments, the biomarkers described herein are used to predict CRS severity in a subject before the subject experiences one or more symptoms of grade 2, 3, 4, or 5 CRS (e.g., before the subject experiences one or more symptoms of grade 3, 4, or 5 CRS, or grade 4 or 5 CRS).

[1025] In embodiments, one or more (e.g., both) of the cytokines, IFN-γ and sgp130, are used to predict CRS severity, e.g., in an adult or pediatric subject, within 1-10 days (e.g., within 1-10, 1-9, 1-8, 1-7, 1-6, 1-5, 1-4, 1-3, 1-2, or 1 day after administration with a CAR T cell (e.g., a CAR T cell described herein, e.g., a CD19 CAR-expressing cell therapy described herein such as, e.g., CTL019; or a CD123 CAR-expressing cell).

[1026] In embodiments, one or more (e.g., two or more, or all three) of the cytokines, IFN-γ, sgp130, and IL1Ra, are used to predict CRS severity, e.g., in an adult or pediatric subject, within 1-10 days (e.g., within 1-10, 1-9, 1-8, 1-7, 1-6, 1-5, 1-4, 1-3, 1-2, or 1 day after administration with a CAR T cell (e.g., a CAR T cell described herein, e.g., a CD19 CAR-expressing cell therapy described herein such as, e.g., CTL019; or a CD123 CAR-expressing cell).

[1027] In embodiments, one or more (e.g., two or more, or all three) of the cytokines, IFN-γ, IL13, and MIP1a are used to predict CRS severity, e.g., in a pediatric subject, within 1-10 days (e.g., within 1-10, 1-9, 1-8, 1-7, 1-6, 1-5, 1-4, 1-3, 1-2, or 1 day after administration with a CAR T cell (e.g., a CAR T cell described herein, e.g., a CD19 CAR-expressing cell therapy described herein such as, e.g., CTL019; or a CD123 CAR-expressing cell).

[1028] In embodiments, one or more of the cytokines, spg130 and IFN-γ, in combination with bone marrow disease (e.g., cancer) are used to predict CRS severity, e.g., in a pediatric subject, within 1-10 days (e.g., within 1-10, 1-9, 1-8, 1-7, 1-6, 1-5, 1-4, 1-3, 1-2, or 1 day after administration with a CAR T cell (e.g., a CAR T cell described herein, e.g., a CD19 CAR-expressing cell therapy described herein such as, e.g., CTL019; or a CD123 CAR-expressing cell).

[1029] In embodiments, CRP level or activity is used to predict CRS severity, e.g., in an adult or pediatric subject, within 1-10 days (e.g., within 1-10, 1-9, 1-8, 1-7, 1-6, 1-5, 1-4, 1-3, 1-2, or 1 day after administration with a CAR T cell (e.g., a CAR T cell described herein, e.g., a CD19 CAR-expressing cell therapy described herein such as, e.g., CTL019; or a CD123 CAR-expressing cell).

[1030] In embodiments, elevated or reduced levels of one or more of the cytokines described herein, e.g., sTNFR2, IP10, sIL1R2, sTNFR1, M1G, VEGF, sILR1, TNFα, IFNα, GCSF, sRAGE, IL4, IL10, IL1R1, IFN-γ, IL6, IL8, sIL2Rα, sgp130, sIL6R, MCP1, MIP1α, MIP1β, and GM-CSF, relative to a control level, indicate that the subject is at high risk of developing severe CRS.

[1031] In embodiments, levels of one or more of the cytokines described herein, e.g., sTNFR2, IP10, sIL1R2, sTNFR1, M1G, VEGF, sILR1, TNFα, IFNα, GCSF, sRAGE, IL4, IL10, IL1R1, IFN-γ, IL6, IL8, sIL2Rα, sgp130, sIL6R, MCP1, MIP1α, MIP1β, and GM-CSF, that are elevated or lowered relative to a reference level, indicate that the subject is at high risk of developing severe CRS. In embodiments, levels of one or more of the cytokines described herein that are elevated by at least 2-fold (e.g., 2, 3, 4, 5, 6, 7, 8, 9, 10, 50, 100, 500, 1000-fold or more) relative to a control level (e.g., a baseline level), indicate that the subject is at high risk of developing severe CRS. In embodiments, levels of one or more of the cytokines described herein that are lowered by at least 10% (e.g., at least 20%, 30%, 40%, 50%, 60%, 70%, 80%, 90%, 95%, or 99%) relative to a reference level, indicate that the subject is at high risk of developing severe CRS. In some embodiments, the reference level is a value that does not depend on the baseline level of the cytokine in the subject. In some embodiments, the reference level is baseline cytokine value or baseline cytokine values by disease burden.

[1032] In embodiments, levels of one or more of the cytokines described herein, e.g., sTNFR2, IP10, sIL1R2, sTNFR1, M1G, VEGF, sILR1, TNFα, IFNα, GCSF, sRAGE, IL4, IL10, IL1R1, IFN-γ, IL6, IL8, sIL2Rα, sgp130, sIL6R, MCP1, MIP1α, MIP1β, and GM-CSF, that are elevated or lowered relative to a reference level, indicate that the subject is at high risk of developing severe CRS.

[1033] In embodiments, levels of one or more (e.g., both) of the cytokines, IFN-γ and sgp130, that are elevated, e.g., by at least 2-fold (e.g., 2, 3, 4, 5, 6, 7, 8, 9, 10, 50, 100, 500, 1000-fold or more) relative to a control level, e.g., when measured within 1-10 days (e.g., within 1-10, 1-9, 1-8, 1-7, 1-6, 1-5, 1-4, 1-3, 1-2, or 1 day after administration with a CAR T cell (e.g., a CAR T cell described herein, e.g., a CD19 CAR-expressing cell therapy described herein such as, e.g., CTL019), indicate that the subject is at high risk of developing severe CRS, e.g., where the subject is an adult or pediatric subject. In embodiments, the control level is a level of IFN-γ and/or sgp130 of a normal, healthy adult or pediatric subject (e.g., without CRS); or of the subject prior to administration of a CAR-expressing cell.

[1034] In embodiments, levels of one or more (e.g., two or more, or all three) of the cytokines, IFN-γ, sgp130, and IL1Ra, that are altered, e.g., by at least 2-fold (e.g., 2, 3, 4, 5, 6, 7, 8, 9, 10, 50, 100, 500, 1000-fold or more) relative to a control level, e.g., when measured within 1-10 days (e.g., within 1-10, 1-9, 1-8, 1-7, 1-6, 1-5, 1-4, 1-3, 1-2, or 1 day after administration with a CAR T cell (e.g., a CAR T cell described herein, e.g., a CD19 CAR-expressing cell therapy described herein such as, e.g., CTL019), indicate that the subject is at high risk of developing severe CRS, e.g., where the subject is an adult or pediatric subject. In embodiments, the altered level is a greater level of sgp130, a greater level of IFN-gamma, or a lower level of IL1Ra, or any combination thereof. In embodiments, the control level is a level of IFN-γ and/or sgp130 of a normal, healthy adult or pediatric subject (e.g., without CRS); or of the subject prior to administration of a CAR-expressing cell.

[1035] In embodiments, levels of one or more (e.g., two or more, or all three) of the cytokines, IFN-γ, IL13, and MIP1α, that are altered, e.g., by at least 2-fold (e.g., 2, 3, 4, 5, 6, 7, 8, 9, 10, 50, 100, 500, 1000-fold or more) relative to a control level, e.g., when measured within 1-10 days (e.g., within 1-10, 1-9, 1-8, 1-7, 1-6, 1-5, 1-4, 1-3, 1-2, or 1 day after administration with a CAR T cell (e.g., a CAR T cell described herein, e.g., a CD19 CAR-expressing cell therapy described herein such as, e.g., CTL019), indicate that the subject is at high risk of developing severe CRS, e.g., where the subject is a pediatric subject. In embodiments, the altered level is a greater level of IFN-gamma, a lower level of IL-13, a lower level of MIP1-alpha, or any combination thereof. In embodiments, the control level is a level of IFN-γ and/or sgp130 of a normal, healthy pediatric subject (e.g., without CRS); or of the subject prior to administration of a CAR-expressing cell.

[1036] In embodiments, a combination of altered levels of one or more of the cytokines, spg130 and IFN-γ, relative to a control level, and a high disease burden (e.g., bone marrow disease), e.g., when measured within 1-10 days (e.g., within 1-10, 1-9, 1-8, 1-7, 1-6, 1-5, 1-4, 1-3, 1-2, or 1 day after administration with a CAR T cell (e.g., a CAR T cell described herein, e.g., a CD19 CAR-expressing cell therapy described herein such as, e.g., CTL019), indicate that the subject is at high risk of developing severe CRS, e.g., where the subject is a pediatric subject. In embodiments, the altered level is a greater level of spg130, a greater level of IFN-gamma, and a greater level of disease burden. In embodiments, the control level is a level of IFN-γ and/or sgp130 of a normal, healthy pediatric subject (e.g., without CRS); or of the subject prior to administration of a CAR-expressing cell.

[1037] In embodiments, a CRP level of less than 7 mg/dL (e.g., 7, 6.8, 6, 5, 4, 3, 2, 1 mg/dL or less), e.g., when measured within 1-10 days (e.g., within 1-10, 1-9, 1-8, 1-7, 1-6, 1-5, 1-4, 1-3, 1-2, or 1 day after administration with a CAR T cell (e.g., a CAR T cell described herein, e.g., a CD19 CAR-expressing cell therapy described herein such as, e.g., CTL019; or a CD123 CAR-expressing cell), indicate that the subject is at low risk of developing severe CRS.

[1038] In embodiments, a CRP level of 6 mg/dL or greater (e.g., 6, 6.8, 7, 8, 9, 10, 11, 12, 13, 14, 15, 16, 17, 18, 19, 20, 22, 24, 26, 28, 30, 32, 34, 36, 38, 40 mg/dL or greater), e.g., when measured within 1-10 days (e.g., within 1-10, 1-9, 1-8, 1-7, 1-6, 1-5, 1-4, 1-3, 1-2, or 1 day after administration with a CAR T cell (e.g., a CAR T cell described herein, e.g., a CD19 CAR-expressing cell therapy described herein such as, e.g., CTL019; or a CD123 CAR-expressing cell), indicate that the subject is at high risk of developing severe CRS.

[1039] In certain aspects, the disclosure provides a method of monitoring CRS (e.g., monitoring a patient having CRS0, CRS1, CSR2, or CRS3) or monitoring for the development of severe CRS, comprising evaluating one or more CRS biomarkers herein. The method can involve measuring the one or more biomarkers at a plurality of timepoints, e.g., at 2, 3, 4, 5, 6, 7, 8, 9, 10, or more timepoints. In certain aspects, the disclosure provides a method of managing CRS, comprising evaluating a subject at risk for developing CRS (e.g., severe CRS), and optionally administering a treatment for CRS, e.g., a treatment described herein.

[1040] Certain cytokines can be referred to by one or more synonynms. For example, IL1R1 and IL1RA, as used herein, are both synonyms for the IL1 receptor. sIL_1RI is a synonym for sILR1. sIL_1RII is a synonym for sIL1R2.

[1041] In embodiments, a subject is identified as at risk for CRS if the subject has a high tumor burden, e.g., prior to administration of a CAR therapy (e.g., a CAR therapy described herein), e.g., as described in Maude & Frey et al, NEJM 2014.

### Identifying a Subject Having CRS

### Use of Laboratory Tests to Determine Whether a Subject has Severe CRS

[1042] In some aspects, the invention features a method of determining whether a subject has severe CRS. The method includes acquiring a CRS risk status, e.g., in response to an immune cell based therapy, e.g., a CAR-expressing cell therapy (e.g., a CAR19-expressing cell therapy or a CAR123-expressing cell therapy) for the subject, wherein said CRS risk status includes a measure of one, two, or more (all) of the following:

[1043] (i) the level or activity of one or more (e.g., 3, 4, 5, 10, 15, 20, or more) cytokines chosen from sTNFR2, IP10, sIL1R2, sTNFR1, M1G, VEGF, sILR1, TNFα, IFNα, GCSF, sRAGE, IL4, IL10, IL1R1, IFN-γ, IL6, IL8, sIL2Rα, sgp130, sIL6R, MCP1, MIP1α, MIP1β, or GM-CSF, or laboratory tests (e.g., analytes) chosen from C-reactive protein (CRP), ferritin, lactate dehydrogenase (LDH), aspartate aminotransferase (AST), or blood urea nitrogen (BUN), alanine aminotransferase (ALT), creatinine (Cr), or fibrinogen, Prothrombin Time (PT), Partial Thromboplastin Time (PTT), or a combination thereof, in a sample (e.g., a blood sample);

[1044] (ii) the level or activity of IL6, IL6R, or sgp130, or a combination thereof (e.g., a combination of any two or all three of IL6, IL6R, and sgp130), in a sample (e.g., a blood sample); or

[1045] (iii) the level or activity of IL6, IFN-gamma, or IL2R, or a combination thereof (e.g., a combination of any two or all three of IL6, IFN-gamma, and IL2R), in a sample (e.g., a blood sample);

[1046] wherein the value is indicative of the subject's severe CRS status.

[1047] In some embodiments, a ferritin level of at least about 23,500, 25,000, 30,000, 40,000, 50,000, 70,000, 80,000, 90,000, 100,000, 150,000, 200,000, or 250,000 ng/ml, and optionally up to about 299,000 or 412,000 ng/ml, is indicative of severe CRS. In some embodiments, a ferritin level of less than about 23,500, 20,000, 18,000, 16,000, 14,000, 12,000, 10,000, 9,000, 8,000, 7,000, 6,000 5,000, 4,000, 3,000, 2,000, or 1,000 ng/ml and optionally greater than about 280 ng/ml, is indicative that the subject does not have severe CRS.

[1048] In some embodiments, a LDH level of at least about 1,700, 2,000, 3,000, 4,000, 5,000, 6,000, 7,000, 8,000, 9,000, 10,000, 15,000, or 20,000 U/L, and optionally up to about 24,000 U/L, is indicative of severe CRS. In some embodiments, a LDH level of less than about 1,700, 1,500, 1,400, 1,300, 1,200, 1,100, 1,000, 900, 800, 700, 600, 500, 400, 300, or 200 U/L, and optionally greater than about 159 U/L, is indicative that the subject does not have severe CRS.

[1049] In some embodiments, a CRP level of at least about 20, 21, 22, 23, 24, 25, 26, 27, 28, 29, 30, 31, 32, 33, 34, or 35 mg/dl, and optionally up to about 38 mg/dl, is indicative of severe CRS. In some embodiments, a CRP level of less than about 20, 19, 18, 17, 16, 15, 14, 13, 12, 11, 10, 9, 8, 7, 6, 5, 4, 3, 2, or 1 mg/dl, and optionally greater than about 0.7 mg/dl, is indicative that the subject does not have severe CRS.

[1050] In some embodiments, an ALT level of at least about 100, 110, 120, 130, 140, 150, 160, 170, 180, 190, 200, 250, 300, 350, 400, 450, 500, 550, 600, 650, 700, 750, 800, 980, 900, 950, or 1000 U/L, and optionally up to 1300 U/L, is indicative of severe CRS. In some embodiments, an ALT level of less than about 100, 90, 80, 70, 60, 50, 40, or 30 U/L, and optionally greater than about 25 U/L, is indicative that the subject does not have severe CRS.

[1051] In some embodiments, an AST level of at least about 150, 200, 250, 300, 350, 400, 450, 500, 550, 600, 650, 700, 750, 800, 980, 900, 950, 1000 U/L, and optionally up to about 1500 U/L, is indicative of severe CRS. In some embodiments, an AST level of less than about 150, 140, 130, 120, 100, 90, 80, 70, 60, 50, 40, or 30 U/L, and optionally greater than about about 15 U/L, is indicative that the subject does not have severe CRS.

[1052] In some embodiments, a BUN level of at least about 18, 19, 20, 25, 30, 35, 40, 45, 50, 60, 70, 80, 90, 100, 110, 120, 130, 140, 150, 160, 170, 180, or 190 mg/dl, and optionally up to about 210 mg/dl, is indicative of severe CRS. In some embodiments, a BUN level of less than about 18, 17, 16, 15, 14, 13, 12, 11, or 10 mg/dl, and optionally greater than about 5 mg/dl, is indicative that the subject does not have severe CRS.

[1053] In some embodiments, a fibrinogen level of less than about 150, 140, 130, 120, 110, 100, 90, 80, 70, 60, 50, 40, or 30 mg/dl, and optionally greater than about 20 mg/dl, is indicative of severe CRS. In some embodiments, a fibrinogen level of at least about 150, 160, 170, 180, 190, 200, or 210 mg/dl, and optionally up to about 230 mg/dl, is indicative that the subject does not have severe CRS.

[1054] In some embodiments, a PT level of at least about 17, 18, 19, 20, 21, or 22 sec, and optionally up to about 24 sec, is indicative of severe CRS. In some embodiments, a PT level of less than about 17, 16, 15, or 14 sec, and optionally greater than about 12 sec, is indicative that the subject does not have severe CRS.

[1055] In some embodiments, a PTT level of at least about 44, 45, 46, 47, 48, 49, 50, 51, 52, 53, 54, 55, 60, 65, 70, 75, 80, or 85 sec, and optionally up to about 95 sec, indicative of severe CRS. In some embodiments, a PTT level of less than about 44, 43, 42, 41, 40, 39, 38, 37, 36, 35, 34, 33, 32, 31, 30, 29, 28, or 27 sec, and optionally greater than about 25 sec, is indicative that the subject does not have severe CRS.

[1056] In some embodiments, a patient with severe CRS has an IFN-□>75 pg/ml and IL-10 >60 pg/ml. In some embodiments, a patient with severe CRS has an IFN-□ of greater than or equal to 40, 50, 60, 70, or 75 pg/ml, an IL-10 level of greater than or equal to 30, 40, 50, or 60 pg/ml, or any combination thereof.

### Biomarkers Assessment

[1057] In accordance with any method described herein, e.g., involving identifying a subject at risk for developing CRS or identifying a subject having CRS, one or more biomarkers can be assessed, e.g., using a method described herein.

[1058] In some embodiments, the amount of the biomarker determined in a sample from a subject is quantified as an absolute measurement (e.g., ng/mL). Absolute measurements can easily be compared to a reference value or cut-off value. For example, a cut-off value can be determined that represents a disease progressing status; any absolute values falling either above (i.e., for biomarkers that increase expression with progression of a cancer, e.g., a hematological cancer such as ALL and CLL) or falling below (i.e., for biomarkers with decreased expression with progression of a cancer, e.g., a hematological cancer such as ALL and CLL) the cut-off value are likely to be disease progressing.

[1059] Alternatively, the relative amount of a biomarker is determined. In one embodiment, the relative amount is determined by comparing the expression and/or activity of one or more biomarkers in a subject with cancer to the expression of the biomarkers in a reference parameter. In some embodiments, a reference parameter is obtained from one or more of: a baseline or prior value for the subject, the subject at a different time interval, an average or median value for a cancer subject (e.g., patient) population, a healthy control, or a healthy subject population.

[1060] The present disclosure also pertains to the field of predictive medicine in which diagnostic assays, pharmacogenomics, and monitoring clinical trials are used for predictive purposes to thereby treat an individual prophylactically. Accordingly, one aspect of the present disclosure relates to assays for determining the amount, structure, and/or activity of polypeptides or nucleic acids corresponding to one or more markers described herein, in order to determine whether an individual having cancer (e.g., a hematological cancer such as CLL and ALL) or at risk of developing cancer (e.g., a hematological cancer such as CLL and ALL) will be more likely to respond to CAR-expressing cell therapy (e.g., a CD19 CAR-expressing cell therapy described herein such as, e.g., CTL019; or a CAR123-expressing cell therapy).

### Methods for Detection of Gene Expression

[1061] Biomarker expression level can also be assayed. Expression of a marker described herein can be assessed by any of a wide variety of known methods for detecting expression of a transcribed molecule or protein. Non-limiting examples of such methods include immunological methods for detection of secreted, cell-surface, cytoplasmic, or nuclear proteins, protein purification methods, protein function or activity assays, nucleic acid hybridization methods, nucleic acid reverse transcription methods, and nucleic acid amplification methods.

[1062] In certain embodiments, activity of a particular gene is characterized by a measure of gene transcript (e.g., mRNA), by a measure of the quantity of translated protein, or by a measure of gene product activity. Marker expression can be monitored in a variety of ways, including by detecting mRNA levels, protein levels, or protein activity, any of which can be measured using standard techniques. Detection can involve quantification of the level of gene expression (e.g., genomic DNA, cDNA, mRNA, protein, or enzyme activity), or, alternatively, can be a qualitative assessment of the level of gene expression, in particular in comparison with a control level. The type of level being detected will be clear from the context.

[1063] Methods of detecting and/or quantifying the gene transcript (mRNA or cDNA made therefrom) using nucleic acid hybridization techniques are known to those of skill in the art (see e.g., Sambrook et al. supra). For example, one method for evaluating the presence, absence, or quantity of cDNA involves a Southern transfer as described above. Briefly, the mRNA is isolated (e.g., using an acid guanidinium-phenol-chloroform extraction method, Sambrook et al. supra.) and reverse transcribed to produce cDNA. The cDNA is then optionally digested and run on a gel in buffer and transferred to membranes. Hybridization is then carried out using the nucleic acid probes specific for the target cDNA.

[1064] Methods to measure biomarkers described herein, include, but are not limited to: Western blot, immunoblot, enzyme-linked immunosorbant assay (ELISA), radioimmunoassay (RIA), immunoprecipitation, surface plasmon resonance, chemiluminescence, fluorescent polarization, phosphorescence, immunohistochemical analysis, liquid chromatography mass spectrometry (LC-MS), matrix-assisted laser desorption/ionization time-of-flight (MALDI-TOF) mass spectrometry, microcytometry, microarray, microscopy, fluorescence activated cell sorting (FACS), flow cytometry, laser scanning cytometry, hematology analyzer and assays based on a property of the protein including but not limited to DNA binding, ligand binding, or interaction with other protein partners.

[1065] A kit of the invention can comprise a reagent useful for determining protein level or protein activity of a marker.

### Subjects

[1066] For any of the methods and kits disclosed herein, the subject treated, or the subject evaluated, is a subject having, or at risk of having, cancer at any stage of treatment. Cancers are described in greater detail above. For example, cancers include, but are not limited to, B-cell acute lymphocytic leukemia (B-ALL), T-cell acute lymphocytic leukemia (T-ALL), acute lymphocytic leukemia (ALL), chronic myelogenous leukemia (CML), chronic lymphocytic leukemia (CLL), B cell promyelocytic leukemia, blastic plasmacytoid dendritic cell neoplasm, Burkitt's lymphoma, diffuse large B cell lymphoma, follicular lymphoma, hairy cell leukemia, small cell- or a large cell-follicular lymphoma, malignant lymphoproliferative conditions, MALT lymphoma, mantle cell lymphoma (MCL), marginal zone lymphoma, multiple myeloma, myelodysplasia and myelodysplastic syndrome, non-Hodgkin's lymphoma, Hodgkin's lymphoma, plasmablastic lymphoma, plasmacytoid dendritic cell neoplasm, and Waldenstrom macroglobulinemia. In an embodiment, the cancer is a hematological cancer. In a preferred embodiment, the cancer is AML. In a preferred embodiment, the cancer is ALL. In another preferred embodiment, the cancer is CLL. In an embodiment, the cancer is associated with CD19 expression. In embodiments, the cancer is associated with CD123 expression.

[1067] In other embodiments, for any of the methods and kits disclosed herein, the subject treated, or the subject evaluated, is a subject to be treated or who has been treated with a CAR T cell, e.g., a CD19 CAR-expressing cell, e.g., CTL-019; or a CD123 CAR-expressing cell.

[1068] In embodiments, the subject is an adult subject, e.g., having an age of greater than 18 years (e.g., 18, 19, 20, 21, 22, 23, 24, 25, 26, 27, 28, 29, 30, years of age or older, 30-35, 35-40, 40-45, 45-50, 50-55, 55-60, 60-65, 65-70, 70-75, 75-80, 80-85, 85-90, 90-95, or 95-100 years of age).

[1069] In embodiments, the subject is a pediatric subject, e.g., having an age less than 18 (e.g., 17, 16, 15, 14, 13, 12, 11, 10, 9, 8, 7, 6, 5, 4, 3, 2, or 1 year of age or younger).

[1070] In embodiments, the subject is at risk (e.g., at high risk) for developing CRS (e.g., severe CRS). In embodiments, the subject is at low risk (e.g., not at risk) for developing CRS (e.g., severe CRS).

[1071] In embodiments, the subject has CRS0, CRS1, CRS2, or CRS3.

[1072] In embodiments, the risk of a subject for developing CRS (e.g., severe CRS) is determined using an evaluation or prediction method described herein.

### EXAMPLES

[1073] The invention is further described in detail by reference to the following experimental examples. These examples are provided for purposes of illustration only, and are not intended to be limiting unless otherwise specified. Thus, the invention should in no way be construed as being limited to the following examples, but rather, should be construed to encompass any and all variations which become evident as a result of the teaching provided herein.

[1074] Without further description, it is believed that one of ordinary skill in the art can, using the preceding description and the following illustrative examples, make and utilize the compounds of the present invention and practice the claimed methods. The following working examples specifically point out various aspects of the present invention, and are not to be construed as limiting in any way the remainder of the disclosure.

### Example 1: Ruxolitinib Treatment Prevented Cytokine Release Syndrome after Chimeric Antigen Receptor T Cell Therapy

[1075] Chimeric antigen receptor T (CART) cell therapy results in impressively high remission rates in B cell acute lymphoid leukemia (ALL), but can in some cases can result in development of cytokine release syndrome (CRS). See, e.g., Porter et al. Sci Transl Med. 2015; 7:303ra139; Maude et al. N Engl J Med. 2014; 371:1507-1517; Lee et al. Lancet. 2015; 385:517-528; Davila et al. Sci Transl Med. 2014; 6:224ra225; Kochenderfer et al. J Clin Oncol. 2014; Kalos et al. Sci Transl Med. 2011; 3:95ra73; Porter et al. N Engl J Med. 2011; 365:725-733; and Grupp et al. N Engl J Med. 2013; 368:1509-1518. CRS is characterized by the development of high-grade fevers, hypotension, fluid overload and respiratory compromise, coincides with T cell expansion and is associated with marked elevation of interleukin-6, interferon-γ and other inflammatory cytokines. Severe CRS is seen in 25-80% of patients treated with CD19 directed CART cell therapy (CART19) and mortality has been reported. As such, there is a need for CRS treatment and prevention. See, e.g., Porter et al. Sci Transl Med. 2015; 7:303ra139; Maude et al. N Engl J Med. 2014; 371:1507-1517; Lee et al. Lancet. 2015; 385:517-528; and Davila et al. Sci Transl Med. 2014; 6:224ra225.

[1076] While the use of the anti-IL6 receptor antibody tocilizumab with or without steroids can sometimes reverse CRS, there is concern that the early introduction of immunosuppressive medications could impair the anti-tumor activity. See, e.g., Grupp et al. N Engl J Med. 2013; 368:1509-1518. Therefore, most investigators currently reserve tocilizumab as therapy for severe (grade 3-4) CRS. See, e.g., Lee et al. Blood. 2014; 124:188-195. The presence of high tumor burden can be a predictor of severe CRS, and cytoreductive chemotherapy could potentially reduce the incidence of severe CRS. See, e.g., Maude et al. N Engl J Med. 2014; 371:1507-1517. However, most patients undergoing CART19 therapy are chemorefractory, and as such, cytoreduction may not be possible. Predictive models based on early post-treatment cytokine elevation have been developed but rely on the timely availability of these results. See, e.g., Teachey et al. Blood. 2015; 126:1334-1334. Therefore, a well-tolerated, clinically available pharmacologic intervention that does not abrogate the anti-tumor effect would represent a vertical advance in the field.

[1077] There is a lack of models, e.g., preclinical models, for CRS after human CART therapy. For example, CART19 therapy of ALL xenografts does not induce CRS. The lack of models has limited the development of CRS prevention modalities. A way to prevent CRS would greatly enhance the feasibility of CART therapy. (See, e.g., van der Stegen S J, Davies D M, Wilkie S, et al. Preclinical in vivo modeling of cytokine release syndrome induced by ErbB-retargeted human T cells: identifying a window of therapeutic opportunity? J Immunol. 2013; 191:4589-4598).

[1078] This Example describes the generation/characterization of a xenograft acute myeloid leukemia model (a preclinical AML xenograft model of CRS), which can be used to study CRS after CART cell therapy. The results herein show that the JAK/STAT inhibitor ruxolitinib could prevent CRS. Ruxolitinib blunted the in vivo T cell proliferation and cytokine production that is associated with severe CRS, without impairing the anti-tumor effect of CART cells. These results may support the incorporation of JAK inhibitors such as ruxolitinib into future clinical trials in combination with CART cell therapy in patients with high risk for the development of severe CRS.

### MATERIALS and METHODS

### Cell Lines and Primary Samples.

[1079] Cell lines were originally obtained from ATCC. For some experiments, MOLM14 cell line was transduced with firefly luciferase/eGFP and then sorted to obtain a >99% positive population. The cell lines were maintained in culture with RPMI media supplemented with 10% fetal bovine serum and 50 IU/ml penicillin/streptomycin. De-identified primary human AML specimens were obtained from the University of Pennsylvania stem cell and xenograft core. For all functional studies, primary cells were thawed and rested at 37° C. for at least 12 hours.

### Generation of CAR Constructs and CAR T Cells.

[1080] CD123 directed CAR constructs and CART cells were generated as previously described. See, e.g., Gill S, Tasian S K, Ruella M, et al. Preclinical targeting of human acute myeloid leukemia and myeloablation using chimeric antigen receptor-modified T cells. Blood. 2014; 123:2343-2354; and Kenderian S S, Ruella M, Shestova 0, et al. CD33 Specific Chimeric Antigen Receptor T Cells Exhibit Potent Preclinical Activity against Human Acute Myeloid Leukemia. Leukemia. 2015.

### In Vitro T-Cell Effector Function Assays.

[1081] T cell degranulation, cytokine, proliferation, cytotoxicity measurements were performed as previously described. See, e.g., Kenderian S S, Ruella M, Shestova 0, et al. CD33 Specific Chimeric Antigen Receptor T Cells Exhibit Potent Preclinical Activity against Human Acute Myeloid Leukemia. Leukemia. 2015.

Animal experiments.

[1082] For the development of CRS preclinical models, NOD-SCID-γ chain−/− (NSG) transgenic for human interleukin-3, stem cell factor and granulocyte macrophage colony-stimulating factor (NSG-S) were used. These were purchased from the Stem Cell and Xenograft Core of the University of Pennsylvania (originally obtained from Jackson Laboratories). Schemas of the utilized xenograft models are discussed in detail in the relevant figures and the Results section herein. Cells were injected in 200 ul of phosphate-buffered saline at the indicated concentration into the tail veins.

### Ruxolitinib.

[1083] Ruxolitinib was purchased from Selleckchem, dissolved in DMSO and diluted to the indicated concentrations. For animal experiments, ruxolitinib was further diluted in 10% HP-beta-cyclodextrin solution (1.6 mg/ml) and was administered to mice by oral gavage at the indicated concentrations.^{12,15,16} See, e.g., Quintas-Cardama A, Vaddi K, Liu P, et al. Preclinical characterization of the selective JAK1/2 inhibitor INCB018424: therapeutic implications for the treatment of myeloproliferative neoplasms. Blood. 2010; 115:3109-3117; Das R, Guan P, Sprague L, et al. Janus kinase inhibition lessens inflammation and ameliorates disease in murine models of hemophagocytic lymphohistiocytosis. Blood. 2016; 127:1666-1675; and Maschalidi S, Sepulveda F E, Garrigue A, Fischer A, de Saint Basile G. Therapeutic effect of JAK1/2 blockade on the manifestations of hemophagocytic lymphohistiocytosis in mice. Blood. 2016.

### Multiparametric Flow Cytometry.

[1084] Flow cytometry was performed as previously described.See, e.g., Kenderian S S, Ruella M, Shestova O, et al. CD33 Specific Chimeric Antigen Receptor T Cells Exhibit Potent Preclinical Activity against Human Acute Myeloid Leukemia. Leukemia. 2015.

### Statistical Analysis.

[1085] All statistics were performed as indicated using GraphPad Prism 6 for Windows, version 6.04 (La Jolla, Calif.). Details of statistics used in individual experiments are listed in figure legends.

### Results

### Establishment of a Novel CRS Xenograft Model

[1086] Using NSG-S mice and primary leukemic blasts, a novel AML xenograft model was established to study the development of CRS. NSG-S mice were engrafted with blasts from AML patients and treated with doses of CD123 directed CART cells (CART123) that were ten-fold higher than in previous reports (FIG. 1A). See, e.g., Gill S, Tasian S K, Ruella M, et al. Preclinical targeting of human acute myeloid leukemia and myeloablation using chimeric antigen receptor-modified T cells. Blood. 2014; 123:2343-2354. In particular, NSG-S mice were engrafted with primary AML blasts (5×10⁶) and bled after 2-4 weeks to confirm engraftment. Mice then were treated with high doses of CART123 1×10⁶ by intravenous tail vein single injection and monitored with serial clinical examinations, weight recording and retro-orbital bleedings for leukemia burden assessment and cytokine analysis. These animals developed an illness characterized by progressive weight loss, generalized weakness, emaciation, hunched bodies, withdrawal and poor motor response. This illness started within one week of CART cell injection, correlated with T cell expansion (CART123 expansion in peripheral blood occurred 10-14 days after injection; FIG. 1B). The illness rapidly evolved and resulted in the death of the animals in 5-7 days (FIG. 1C). A high dose of CART123 resulted in early mortality of established AML xenografts (within two weeks of injection). (CART123 were injected on day 41 post AML injection in the experiment.)

[1087] Mice were bled for serum cytokines one week after CART123 treatment. Mice treated with CART123 had significant elevation of multiple inflammatory cytokines as outlined in the panel. In particular, serum from these mice five days after CART123 showed an extreme elevation of IL-6, Interferon-γ, tumor necrosis α, and other inflammatory cytokines (FIG. 1D), resembling human CRS after CART cell therapy. See, e.g., Lee D W, Kochenderfer J N, Stetler-Stevenson M, et al. T cells expressing CD19 chimeric antigen receptors for acute lymphoblastic leukaemia in children and young adults: a phase 1 dose-escalation trial. Lancet. 2015; 385:517-528; Kalos M, Levine B L, Porter D L, et al. T cells with chimeric antigen receptors have potent antitumor effects and can establish memory in patients with advanced leukemia. Sci Transl Med. 2011; 3:95ra73; Porter D L, Levine B L, Kalos M, Bagg A, June C H. Chimeric antigen receptor-modified T cells in chronic lymphoid leukemia. N Engl J Med. 2011; 365:725-733; and Grupp S A, Kalos M, Barrett D, et al. Chimeric antigen receptor-modified T cells for acute lymphoid leukemia. N Engl J Med. 2013; 368:1509-1518.

Treatment with Ruxolitinib Ameliorated CRS Severity without Impairing Anti-Tumor Activity after CART123

[1088] Ruxolitinib is a JAK/STAT pathway inhibitor that is FDA approved for myelofibrosis and polycythemia vera. See, e.g., Harrison C, Kiladjian J J, Al-Ali H K, et al. JAK inhibition with ruxolitinib versus best available therapy for myelofibrosis. The New England journal of medicine. 2012; 366:787-798; and Vannucchi A M, Kiladjian J J, Griesshammer M, et al. Ruxolitinib versus standard therapy for the treatment of polycythemia vera. The New England journal of medicine. 2015; 372:426-435. In preclinical and clinical studies, ruxolitinib has resulted in a significant reduction of inflammatory cytokines. See, e.g., Quintas-Cardama A, Vaddi K, Liu P, et al. Preclinical characterization of the selective JAK1/2 inhibitor INCB018424: therapeutic implications for the treatment of myeloproliferative neoplasms. Blood. 2010; 115:3109-3117; Das R, Guan P, Sprague L, et al. Janus kinase inhibition lessens inflammation and ameliorates disease in murine models of hemophagocytic lymphohistiocytosis. Blood. 2016; 127:1666-1675; Maschalidi S, Sepulveda F E, Garrigue A, Fischer A, de Saint Basile G. Therapeutic effect of JAK1/2 blockade on the manifestations of hemophagocytic lymphohistiocytosis in mice. Blood. 2016.

[1089] The experiments in this Example investigated ruxolitinib as a modality to prevent or reduce CRS severity after CART123 in the AML xenograft model described herein. NSGS mice were engrafted with primary AML blasts (5×10⁶) and bled after 2-4 weeks to confirm peripheral blood engraftment. NSGS mice bearing primary AML were treated with CART123 (1×10⁶) by intravenous tail vein single injection along with ruxolitinib or vehicle control. The mice were randomized to receive different doses of ruxolitinib (30 mg/kg, 60 mg/kg or 90 mg/kg) or vehicle by oral gavage twice a day. Treatment started on the day of CART123 injection and continued for a week (FIG. 2A). Mice were then monitored with serial clinical examinations, weight recording, retro-orbital bleedings for leukemia burden assessment and cytokine analysis and followed for survival.

[1090] Mice treated with ruxolitinib 60 mg/kg or 90 mg/kg exhibited less severe clinical illness (CRS) as manifested by attenuated weight loss when compared with mice treated with CART123 alone or with CART123 combination with ruxolitinib 30 mg/kg (FIG. 2B).

[1091] All groups exhibited an equivalent anti-leukemic effect (FIG. 2C). This suggests that ruxolitinib had no direct anti-tumor activity and did not impair the anti-tumor activity of CART123. Therefore, ruxolitinib 60 mg/kg was used for further experiments. Ruxolitinib resulted in amelioration of illness in these mice, transient weight loss (with 60 mg/kg) (FIG. 2d), leukemia eradication (FIG. 2H), and blunted T cell expansion in the peripheral blood (FIG. 2E). Further, ruxolitinib treatment reduced levels of inflammatory cytokines (FIG. 2F) and led to long-term disease free survival (FIG. 2G). In particular, mice treated with high doses of CART123 had early mortality (death due to illness associated with CRS), while mice treated with a combination with ruxolitinib 60 mg/kg led to long term survival. In an analysis of peripheral blood from surviving mice treated with ruxolitinib at 70 days post AML injection (gated on live human CD45 positive cells), all surviving mice had eradication of leukemia. Data are representative of two independent experiments.

[1092] These results describe the generation of a clinically relevant animal model of human CRS. The results also demonstrate that the JAK/STAT inhibitor ruxolitinib can prevent the development of severe CRS without impairing the anti-tumor effect of CART cells. The mechanism by which ruxolitinib achieves this effect may be through attenuation of the production of multiple cytokines, including the canonical CRS-inducing cytokines. In the absence of a preclinical model of the CART19/ALL system, these results provide a useful platform for the study of CRS prevention and treatment modalities. Ruxolitinib has been studied clinically for myeloproliferative neoplasms, graft-versus-host disease, and “Philadelphia-like” ALL. See, e.g., Zeiser R, Burchert A, Lengerke C, et al. Ruxolitinib in corticosteroid-refractory graft-versus-host disease after allogeneic stem cell transplantation: a multicenter survey. Leukemia. 2015; 29:2062-2068; and Roberts K G, Li Y, Payne-Turner D, et al. Targetable kinase-activating lesions in Ph-like acute lymphoblastic leukemia. N Engl J Med. 2014; 371:1005-1015. These results herein provide evidence that ruxolitinib can be combined with CART cell therapy for the prevention of CRS.

### Example 2: Ibrutinib Improved Cytokine-Release Syndrome after Anti-CD19 Chimeric Antigen Receptor T Cells for B Cell Neoplasms

[1093] Chimeric antigen receptor T cells (CART) hold great promise for the treatment of B cell neoplasms. Anti-CD19 chimeric antigen receptor T cells (CART19) can generate impressive responses, including complete responses, in B cell leukemia and lymphoma. See, e.g., Porter et al. The New England journal of medicine 2011; 365(8):725-33; Maude et al. N Engl J Med 2014; 371(16):1507-17; Schuster et al. Blood 2015; 126(23):183-183; Davila et al. Sci Transl Med 2014; 6(224):224ra25; Turtle et al. J Clin Invest 2016; 10.1172/JCI85309; Lee et al. Lancet 2015; 385(9967):517-28; Kochenzerfer et al. Journal of Clinical Oncology 2015; 33(6):540-9; Dai et al. J Natl Cancer Inst 2016; 108(7). However, widespread applicability of this immunotherapy can be limited by cytokine-release syndrome (CRS).

[1094] CRS is a severe systemic inflammation with massive release of cytokines by activated T cells and immune cells, can lead to serious toxicities including deaths. CRS is characterized by elevated cytokines (IFNg, TNFα, IL-6 and others) in the peripheral blood representing a systemic inflammatory state. See, e.g., Kalos et al. Science translational medicine 2011; 3(95):95ra73. Clinically CRS is characterized by high fevers and a systemic inflammatory response that may progress to hypotension, hypoxia, altered mental status, multi-organ dysfunction and death. CRS is observed in the majority of responding patients and typically correlates with high tumor burden. See, e.g., Maude et al. N Engl J Med 2014; 371(16):1507-17. Mitigating strategies that have been attempted include CART19 dose reduction or fractionation and tumor cytoreduction before CART19 infusion. See, e.g., Davila et al. Sci Transl Med 2014; 6(224):224ra25; Turtle et al. J Clin Invest 2016; 10.1172/JCI85309; Frey et al. American Society of Hematology Annual (ASH) Meeting 2014 2014; Abs #2296; Park et al. Journal of Clinical Oncology 2015; 33(15); Lee et al. Blood 2014; 124(2):188-95; and Maude et al. Cancer J 2014; 20(2):119-22. Approaches to prevent CRS have been lacking.

[1095] Recently, a novel algorithm has been developed with the aim of predicting CRS and possibly starting pre-emptive treatments. See, e.g., Teachey et al. Cancer Discov 2016; 10.1158/2159-8290.CD-16-0040. However, current practice is to reserve tocilizumab and steroids for patients experiencing severe (grade 3-4) CRS, due to the concern that pre-emptive CRS treatment could impair the anti-tumor effect of the infused CART cells. The management of CRS remains a key factor for extending CART19 to older and frail patients and to increase its safety in the fit adult and pediatric cohorts. (Frey et al. J Clin Oncol 34, 2016 (suppl; abstr 7002)).

[1096] The Bruton's tyrosine kinase inhibitor ibrutinib is FDA-approved for relapsing chronic lymphocytic leukemia (CLL) and mantle cell lymphoma (MCL) and is extensively used in B cell neoplasms. See, e.g. Wang et al. Blood 2015; 126(6):739-45; and Byrd et al. N Engl J Med 2013; 369(1):32-42.

[1097] Ibrutinib can be combined with CART19, leading to synergistic responses in both MCL and ALL. See, e.g. Ruella et al. Clin Cancer Res 2016; 10.1158/1078-0432.CCR-15-1527; Fraietta et al. Blood 2016; 10.1182/blood-2015-11-679134. Ibrutinib has also been shown to modulate T cell functions. Ibrutinib inhibits IL-2 induced tyrosine kinase (ITK) that is expressed in T and NK cells. See, e.g., Dubovsky et al. Blood 2013; 122(15):2539-49. This effect could lead to modulation of T cell cytokine production as shown in murine T cell models, and to increase the effect of checkpoint blockade together with reduction of cytokine production, as demonstrated in a NK model. See, e.g., Sagiv-Barfi et al. Proc Natl Acad Sci USA 2015; 112(9):E966-72; and Kohrt et al. Blood 2014; 123(12):1957-60. Ruella et al. showed that ibrutinib can blunt cytokine production by CART19 cells in vitro. See Ruella et al. Clin Cancer Res 2016; 10.1158/1078-0432.CCR-15-1527.

[1098] Experiments described herein were performed to determine whether adding ibrutinib to CART19 would reduce CRS without impairing the anti-tumor effect, thus enhancing overall survival in a relevant preclinical model.

[1099] To date, there are no known models that recapitulate the massive increase in cytokine release that is observed after CART-19 treatment. This example describes the development of such a model generated by intravenously injecting NOD-SCID gamma-chain deficient mice (NSG) with primary MCL cells collected from a patient with relapsed MCL (FIG. 3A). NOD SCID Gamma-chain deficient mice were injected with 2×10⁶ primary MCL cells intravenously. Engraftment was monitored with serial retro-orbital peripheral blood bleeding and when neoplastic B cells were detected (high tumor burden, typically around day 50-60) mice were randomized to receive no treatment or CART19. Mice were then followed up for clinical signs, T cell engraftment, tumor burden and survival.

[1100] Since CRS has been clearly associated with high tumor burden, the tumor was allowed to grow for up to 50-60 days when spleen size was significantly increased and clinically palpable. High tumor burden was demonstrated by the size of the spleen of a representative mouse sacrificed before T cell treatment (FIG. 3B). At that point in time, point neoplastic B cells were also seen in the peripheral blood (FIG. 3C). At that point 1×10⁶ CART19 cells were injected i.v. As a control, PBS instead of cells was injected. By day 2 after the infusion, mice receiving CART19, but not mice receiving PBS, started to show clinical signs of distress (reduced mobility, hyperventilation) and experienced early death (FIG. 3D) compared to controls (p<0.05). Clinically, this early toxicity resembled CRS. At day 4 after CART19 infusion, serum from mice was collected and analyzed for cytokine concentration by Luminex. The Luminex assay is specific for human cytokines as it does not react with murine cytokines. CART19-treated mice but not control mice showed significantly elevated serum concentrations of several human cytokines, including IL-6, IFNg, TNFα, IL-2 and GM-CSF (FIG. 3E).

[1101] Having established a clinically-relevant model of CRS in the context of B cell neoplasms treated with CART19, experiments were performed to determine if the addition of ibrutinib to CART19 would reduce this early toxicity. NOD SCID Gamma-chain deficient mice were injected with 2×10⁶ primary MCL cells intravenously. Engraftment was monitored with serial retro-orbital peripheral blood bleeding and when neoplastic B cells were detected (high tumor burden, typically around day 50-60), mice were randomized to receive CART19 plus vehicle or CART19 plus ibrutinib in the drinking water (125 mg/Kg/day). Ibrutinib (PCI-32765) was purchased from MedKoo (#202171) or Selleck Biochemicals (#S2680) as a powder or DMSO solution. The products obtained from the two companies were compared and demonstrated to have equivalent activity (data not shown). For in vitro experiments, ibrutinib was dissolved in DMSO and diluted to 2, 10, 100 or 1000 nM in culture media. For in vivo experiments, ibrutinib powder was dissolved in a 10% HP-beta-cyclodextrin solution (1.6 mg/ml) and administered to mice in the drinking water. Mice were then followed up for clinical signs, T cell engraftment, tumor burden and survival. As shown in the schematic in FIG. 4A, high-tumor burden mice were treated with either CART19 (plus vehicle) or CART19 in combination with ibrutinib. Mice receiving the combination of CART19 and ibrutinib had a prolonged overall survival (OS) as compared to mice receiving CART19 alone (FIG. 4B), despite similar tumor burden (FIG. 4C). Also, ibrutinib augmented, rather than impaired, CART19 expansion in the PB (FIG. 4D)—this confirmed previous observations. See, e.g., Ruella et al. Clin Cancer Res 2016; 10.1158/1078-0432.CCR-15-1527. Cytokines in the peripheral blood at day 4 were significantly reduced in ibrutinib-treated mice, including IL-6, IFNg, TNFα, IL-2 and GM-CSF (FIG. 4E).

[1102] Having previously shown that ibrutinib led to a modest reduction in T cell cytokine production (see I.d.), and given that ibrutinib was initially developed as a cytostatic anti-tumor agent, experiments were performed to determine whether ibrutinib treatment affects cytokine production by cultured MCL cells as well. As shown in FIG. 4F, in vitro increasing concentrations of ibrutinib reduced the cytokines produced by the tumor, possibly contributing to the reduced CRS observed in vivo.

[1103] CRS is the major factor limiting the widespread feasibility of CAR T cell therapy for cancer. The results herein demonstrate development of a relevant pre-clinical model for CRS (e.g., fatal CRS) in B cell neoplasms after CART19 treatment. Elevated levels of human inflammatory cytokines were found in the serum of CART19-treated mice as compared to controls. Co-administration of ibrutinib with CART-19 blunted this cytokine storm and significantly increased overall survival (p<0.05). The data herein show that the BTK/ITK inhibitor ibrutinib in combination with CART19 led to a reduction in CRS and enhanced survival by blunting the production of inflammatory cytokines from both CART and tumor cells. The results show that ibrutinib did not impair T cell proliferation in vivo, a factor that has been shown to be a key element for anti-tumor efficacy. Ibrutinib synergizes with the anti-tumor efficacy of CART19 in B-cell malignancies. The results presented herein suggest that the combination of ibrutinib and CART19 can reduce the toxicity of CAR T cell therapy. The CART19-ibrutinib combination may be a new strategy to prevent CRS in acute leukemia as well as an attractive two-pronged approach for B cell neoplasms that are currently treated with ibrutinib.

### Example 3: Chimeric Antigen Receptor T Cell Activation Induced Interleukin 6 Secretion by Monocyte-Lineage Cells

[1104] Chimeric antigen receptor T cell therapy targeting CD19 has demonstrated success against B-cell malignancies, but is sometimes complicated by serious systemic toxicity in the form of cytokine release syndrome (CRS). The symptoms of this syndrome appear to be primarily mediated by elevations in interleukin 6 (IL-6), and management has focused on inhibition of IL-6 signaling. The cellular source and function of IL-6 in CRS remained unknown before this study; this has limited informed management of CRS. The results herein demonstrate that secretion of IL-6 is driven by CAR T cell activation but is derived from monocyte-lineage APCs. T cell-induced activation of APCs occurred in a contact-independent mechanism, and IL-6 secreting APCs had no impact on T cell transcriptional profiles or cytotoxicity. The results herein also show that CAR T cells delivered to patients with acute lymphoblastic leukemia did not secrete IL-6 in vivo during clinical CRS. These results suggest that anti-IL-6 therapy may not impact CAR T cell anti-tumor efficacy.

### Introduction

[1105] The primary toxicity associated with highly-active cellular therapy using CD19 chimeric antigen receptor (CD19 CAR) T cells is the hyper-inflammatory state known as “cytokine release syndrome” (CRS) (Grupp NEJM 2013). This toxicity is characterized by clinical symptoms ranging from a mild influenza-like syndrome to extreme elevations in core body temperature and life-threatening multi-organ failure. In a report of CD19 CAR T cells for acute lymphoblastic leukemia (ALL), Grupp et al. described a biochemical profile demonstrating significant elevations in several serum cytokines, including interleukin-2 (IL-2), interleukin-6 (IL-6) and gamma-interferon (INF-7) in patients with CRS (Grupp NEJM 2013). One patient treated in a phase I study experienced dramatic toxicity in the form of distributive shock requiring multiple vasopressors for vascular support and respiratory failure requiring prolonged mechanical ventilation. Administration of the anti-IL-6 receptor agent tocilizumab several days into CRS resulted in prompt hemodynamic stabilization, pointing to the central role of IL-6 in causing these symptoms. Davila et al. and Lee et al. have reported a similar IL-6-driven syndrome with CD19 CAR T cells (Davila STM 2014, Lee Lancet 2015). There is limited understanding of the cellular source of IL-6 during CRS, whether IL-6 is secreted by CAR T cells themselves as a means of homeostatic support in a rapidly dividing cell population, or if IL-6 is necessary for T cell activity. Several cellular sources of IL-6 have been identified, including macrophages, dendritic cells and B and T lymphocytes (Schulert and Grom, Ann Rev Med 2015; Leech M D J I 2013; Barr T A J E M 2012; Trinschek Plos One 2013). T cells have been identified as the primary source of pathologic IL-6 in models of multiple sclerosis (Trinschek Plos One 2013), and T cell-derived IL-6 has been implicated in mediating a positive feedback loop driving T_{H}17 cell differentiation (Ogura Immunity 2008), allowing for the possibility that T cells themselves are the source of the high level of IL-6 observed. While classical T cell activation in response to infection and auto-antigens has been studied, the effect of the mechanism of T cell activation is poorly understood in the context of CARs, and CAR-driven activation may generate distinct cytokine support needs and have a distinct effect on T cell-mediated IL-6 production. In the absence of a better understanding of the role of IL-6 in CAR T cell function and in CRS, balancing the management of severe toxicity with optimization of anti-tumor activity has been driven by empiric trial and error.

[1106] In an examination of a panel of serum cytokines in pediatric and adult patients receiving CD19 CAR T cell therapy for ALL, Teachey et al. observed that elevations in IFN-γ, IL-6, IL-8, soluble IL-2 receptor-α (sIL-2Rα), soluble IL-6 receptor (sIL-6R), monocyte chemoattractant protein 1 (MCP1), macrophage inflammatory protein 1α (MIP-1α), macrophage inflammatory protein 1β (MIP-1β) and granulocyte-macrophage colony stimulating factor (GM-CSF) were associated with the development of severe CRS (Teachey Cancer Discov 2016). Early elevations in IFN-γ, serum glycoprotein 130 (sgp130), a component of sIL-6R, and sIL-1RA were predictive markers of development of severe CRS. See Id. Both T-cell expansion and baseline disease burden have been thought to be primary determinants of severity of CRS; however T-cell expansion itself was not associated with development of CRS. Similarly, disease burden alone did not provide any further predictive modeling over serum cytokine levels. Examination of all patients who received tocilizumab therapy demonstrated a consistent and rapid resolution of toxicity after administration, with discontinuation of vasopressors within 24-36 hours, confirming the clinical significance of IL-6 in mediating toxicity. See Id.

[1107] The immunologic cascade that results from CAR-mediated T cell activation, as opposed to native TCR-mediated activation, and the resulting cellular events that lead to the biochemical derangements of CRS have clinical relevance; two adult patients treated at the University of Pennsylvania have died while experiencing CRS, and many patients have experienced significant morbidity. The Teachey et al. study described above provided a detailed cytokine profile of patients who experienced CRS, and it was observed that cytokine dynamics in CRS are almost identical to those in hemophagolytic lymphohistiocytosis (HLH). This inflammatory syndrome is driven by macrophage activation, suggesting that CAR T cells are unlikely lone actors in CRS, and other immune cells may be key players. The clinical understanding thus far has hinged on elevations in IL-6; IL-6 drives clinical symptoms, and IL-6 is one of several cytokines that becomes upregulated during CAR T cell activation in vivo, suggesting a network of cytokine signaling contributing to CRS.

[1108] In this Example, to investigate the cellular drivers of CRS, antigen-presenting cells (APCs) derived from the monocyte lineage were isolated. In vivo and in vitro co-culture experiments were performed to identify which cell types led to the cytokine elevations associated with this clinical syndrome. The results herein demonstrate that while T cells alone are sufficient for the production of some CRS-associated cytokines, both activated T cells and APCs are necessary for production of IL-6, and that this dependence is not reliant on cell:cell contact. The results herein also identify that monocyte-derived cells are responsible for IL-6 secretion in response to CAR-mediated T cell activation, and that CAR-activated T cells are not affected by the presence of APCs. These details of the CRS cascade may provide not only a deeper immunologic understanding of this syndrome, but also further opportunity for management of CRS.

### Materials and Methods

### Xenograft Studies and Patient Samples

[1109] 6-10 week old NOD-SCID-γc^{-/-} (NSG) mice were obtained from the Jackson Laboratory (Bar Harbor, Me.) or bred in house under an approved Institutional Animal Care and Use Committee (IACUC) protocol and maintained in pathogen-free conditions. Patient leukemia and T cells were obtained under a Children's Hospital of Philadelphia Institutional Review Board approved protocol (CHP959 and CHP784, respectively). T cell engineering for this study has been described previously (Grupp et al NEJM 2013). Animals were given 10⁶ primary human ALL cells via tail vein, followed by 5×10⁶ CAR T cells (11% CAR+) seven days later. Peripheral blood was collected via retro-orbital sinus and submitted to the University of Pennsylvania Human Immunology Core for cytokine quantification.

### Isolation of Normal Donor Monocytes and T Cells and T Cell Engineering

[1110] Primary human T cells and monocytes from normal donors were procured through the University of Pennsylvania Human Immunology Core. For all co-culture experiments, T cells and monocytes were obtained from the same donor. T cells were combined at a ratio of 1:1 CD4:CD8 cells at a concentration of 10⁶ cells/mL T cell culture media with stimulatory microbeads coated with antibodies directed against CD3 and CD28 (Life Technologies, Grand Island, N.Y., Catalog #111.32D) at a concentration of 3 beads/cell, as had been reported previously (Laport G G, Blood 2003). 24 hours after initial stimulation, T cells were exposed to lentiviral vector encoding the CD19 CAR construct at a multiplicity of infection (MOI) of 5-10 particles/cell. Stimulatory beads were removed on day 7, and cells were counted and volumes measured serially until growth and size trends indicated cells were rested down, at which time they were frozen. Cells were then thawed 12-18 hours prior to in vivo injection or in vitro co-culture. Untargeted T cells were cultured in the same manner but were not treated with lentiviral vector.

### Lentiviral Vector Preparation

[1111] High-titer, replication-defective lentiviral vectors were produced using 293T human embryonic kidney cell. HEK293T cells were seeded at 10⁷ cells per T150 tissue culture flask 24 hours before transfection. On the day of transfection, cells were treated with 7 μg of pMDG.1, 18 μg of pRSV.rev, 18 μg of pMDLg/p.RRE packaging plasmids and 15 μg of transfer plasmid in the presence of either Express-In Transfection Reagent (Open Biosystems, Lafayette, Colo.) or Lipofectamine 2000 transfection reagent (Life Technologies, Grand Island, N.Y., Catalog #11668019). Transfer plasmids containing CAR constructs were modified so that expression of the CAR was under control of the EF-1α promoter as previously described. Viral supernatants were harvested 24 hours and 48 hours after transfection and concentrated by ultracentrifugation overnight at 10,500×g. 24h after initial stimulation, T cells were exposed to lentiviral vector at a concentration of 5-10 infectious particles per T cell, and then cultured as described above.

### Production of Monocyte Lineage Cells

[1112] Monocytes were collected as described above, and differentiation was performed using methods described previously (Han J Immunother 2009). Briefly, 2×10⁶ monocytes were plated in 1 mL of RPMI 1640 supplemented with supplemented with 0.1 mM MEM Non-Essential Amino Acids, 2 mM L-Glutamine, 100 units/ml Penicillin, 100 μg/ml Streptomycin (Life Technologies) and 10% fetal calf serum and cultured for 4 days. Cells were then harvested using 2 mM EDTA and stained with CD14, CD45, CD68 and CD163 to confirm macrophage differentiation. To produce dendritic cell lineages, monocytes were plated at 6×10⁶ in 1 mL of cR10, and treated with 0.2 μg/mL human IL-4 (R&D Systems, Minneapolis, USA, #204-IL-050) and 0.2 μg/mL GMCSF (R&D Systems, Minneapolis, USA, #215-GM-050). On day 4 cells were either harvested using 2 mM EDTA (immature dendritic cells), or cultures were treated with 100 ng/mL LPS (Sigma-Aldrich, St. Louis, USA; #L2630) and 0.05 μg/mL IFN-γ (R&D Systems, Minneapolis, USA, #285-IF-100) (mature dendritic cells). 24 hours later, cells were harvested with 2 mM EDTA and stained with CD45, CD80 and CD86 to confirm immature DC and mature DC differentiation.

### Co-Culture Assay

[1113] T cells were engineered as described above, and monocytes lineages were differentiated as described above. Nalm-6 ALL cell lines were used as targets. Cells were combined at a ratio of 50 T cells, 10 targets and 1 APC in 150 μL of cR10. 20 μL of supernatant was aspirated after 18 hours and replaced with 20 μL cR10. 20 μL was then aspirated again at 48 hours. For trans-well co-culture assays, T cells and targets were cultured as described for our standard co-culture assay. Pooled monocytes were seeded in ThinCert cell culture inserts (Greiner Bio-one) placed in each well of the 24-well plate. Co-cultures were incubated at 37° C. and cells from both the inserts and the wells were collected at 18 hours and 48 hours for RNA isolation as described below.

### Measurement of Cytokine Levels

[1114] Cytokine concentration determination from animal serum and from culture supernatants was performed by the University of Pennsylvania Human Immunology Core using the Millipore Luminex 200 system and Milliplex Human Cytokine/Chemokine 21 Plex Assay (EMD Millipore, Bedford, Mass., USA; products #40-012 and #HCY4MG-64K-PX21). Measurements were performed using standard product protocols.

### RNA Extraction

[1115] Total RNA was prepared from cell pellets lysed in Qiagen Buffer RLT (Qiagen Inc.).

[1116] Lysates were processed and RNA extracted using RNA Clean & Concentrator-5 columns (Zymo Research Corp.) according to the manufacturer's protocol. Total RNA quality and yield were assessed using either an Agilent 2100 Bioanalyzer with Eukaryotic Total RNA Pico chips (Agilent Technologies) or a Biophotometer (Eppendorf) equipped with a Hellma TrayCell microvolume ultra-micro cell (Hellma Analytics).

NanoString nCounter Assay

[1117] Gene expression was measured on the nanoString nCounter SPRINT Profiler (NanoString Technologies) using the nCounter Human Immunology v2 gene expression Code Set (NanoString Technologies). Samples were prepared and processed according to the manufacturer's recommendations. Briefly, 50 ng total RNA was hybridized in solution to the nCounter Human Immunology v2 gene expression Code Set for 18 h at 65° C. Hybridized samples were then loaded into the nCounter SPRINT cartridge (NanoString Technologies) which was then sealed and placed in the instrument for processing and analysis.

### CD107a Degranulation Assay

[1118] Co-culture experiments were setup as described above. After 18 hours, this culture was combined with an antibody cocktail consisting of anti-CD107a-e660 (eBiosciences, San Diego, Calif., Catalog #50-1079), and stimulatory antibodies directed against CD28 (clone 9.3) and CD49d (BD Biosciences, Franklin Lakes, N.J., Catalog #555051) for one hour. Intracellular protein transport was halted by addition of GolgiStop (BD Biosciences, Franklin Lakes, N.J., Catalog #554724) and cells were incubated for an additional three hours. Cells were then harvested and stained for CD8 and CD107a (BD Biosciences, Franklin Lakes, N.J.) and analyzed on an Accuri C6 Flow Cytometer.

### Results

### Combining CD19 CAR T Cells and Targets Did not Mimic Clinically-Observed CRS in Xenograft Mice

[1119] To evaluate the role of CAR-activated T cells in CRS, a patient-derived xenograft model was created of an aggressive and multiply refractory pediatric acute lymphoblastic leukemia (ALL). The malignant cells used to establish this xenograft were derived from a patient with ALL treated as described in Grupp NEJM 2013 (patient CHP-100). As reported in Grupp et al., this patient experienced grade 4 toxicity, including need for prolonged vasopressor support and mechanical ventilation. Clinical CRS was accompanied by a significant elevation in serum IL-6 (approximately 1000× increase on day 6 after CD19 CAR T cell infusion compared to baseline), and rapid resolution of symptoms after administration of αIL6R antibody therapy. To evaluate the role of this patient's CAR T cells in producing CRS-associated cytokines in vivo, NOD/SCID/cγ^{-/-} (NSG) mice were engrafted with 10⁶ primary acute lymphoblastic leukemia cells from patient CHP-100, followed by injection of 5×10⁶ CD19 CART cells from the same patient seven days later (T cells were 11% CAR+). A subgroup of animals was also given tocilizumab (100 μg via intraperitoneal injection) every other day following CAR T cell infusion. Measurement of serum cytokine levels on day 3 after CAR T cell infusion demonstrated measurable levels of IFN-γ, IL-2 and GMCSF, but no detectable IL-6, regardless of the presence of tocilizumab (FIG. 5). A similar pattern was observed when animals were engrafted with the Nalm-6 ALL cell line and treated with CD19 CAR T cells derived from a normal donor (FIG. 6), supporting that this lack of IL-6 production was not a patient-specific phenomenon, and suggesting that the cellular component responsible for the significant IL-6 production observed clinically was not present in these immunodeficient xenografts.

### Presence of APCs During Antigen-Mediated T-Cell Killing Resulted in Elevated Levels of CRS-Associated Cytokines

[1120] Based on the similarities in serum cytokine profiles between CRS and HLH, the role that antigen-presenting cells of the monocyte lineage may play in cytokine production was evaluated. Either CD19 CAR T cells or untargeted T cells were combined with a CD19+ ALL cell line (Nalm-6) in the presence of APCs in vitro at cell ratios of 10 T cells: 50 targets: 1 APC. Culture supernatants were collected after 18 hours of co-culture. As demonstrated in the prospective clinical study described in Teachey et al. Cancer Discovery 2016, early elevations were observed in serum levels of IFN-γ. IFN-γ was detected whenever T cells were activated by targets, with no significant difference based on the presence of APCs (FIG. 7A). Moderate levels of GMCSF were secreted when T cells were combined with targets, however significant elevations were noted when APCs were included in co-culture (FIG. 7B), suggesting either enhancement of T cell-based secretion by APCs or two cellular sources of GMCSF. IL-2, classically considered a CD4 T cell factor, demonstrated a similar pattern, with some secretion when T cells and targets were combined, but significant enhancement with the inclusion of APCs in co-culture (FIG. 7C). This pattern differed when examining IL-8 and IL-6. Similar levels of IL-8 were observed in cultures of APCs alone, APCs combined with targets and APCs combined with targets and untargeted T cells (FIG. 7D). Levels significantly increased when APCs were combined with targets and targeted T cells (FIG. 7D). Together, these data suggest that APCs secreted low-levels of IL-8 independent of T cells or targets, but the combination of targets, targeted T cells and APCs resulted in high levels of IL-8. IL-6 levels followed a similar pattern (FIG. 7E); low levels were observed when APCs were alone, combined with targets and combined with untargeted T cells and targets. Levels significantly rose when APCs were combined with activated T cells and targets.

[1121] To clarify if the APC:T cell interaction was mediated by cell:cell contact or by soluble factors, the same co-cultures were set up in parallel with co-cultures which separated T cells and targets from APCs using trans-well inserts. The same numbers of T cells and targets were placed in the plate wells, and the same number of APCs were placed in trans-well inserts. As shown in FIGS. 7F-7J, absolute concentrations of cytokines varied but relative quantities of cytokine secretion were unchanged for IFN-γ, GMCSF, IL-2 and IL-8. The trans-well separation resulted in a relative increase in IL-6 when APCs were combined with targets in the presence or absence of untargeted T cells. However, the highest IL-6 levels were still observed when CD19 CAR T cells were combined with targets and APCs, demonstrating a statistically significant elevation compared to all other co-culture experiments (p=0.001). These studies demonstrate that the cytokine network induced upon CAR-mediated T cell activation in the presence of APCs was not dependent on cell:cell contact between T cells and APCs, and the combination of targets, CAR T cells and APCs was necessary for high levels of IL-6 production.

### Monocyte-Lineage Cells Differentially Secrete CRS-Associated Cytokines

[1122] Experiments were performed to identify which APC lineages were necessary for IL-6 secretion. Monocytes were isolated and cultured in vitro to produce the differentiated progeny of the monocyte lineage, namely immature dendritic cells, mature dendritic cells and macrophages (Han J Immunother 2009) (osteoclasts were not included). These undifferentiated monocytes and differentiated lineages were combined with CD19 CAR T cells and targets in co-culture as described. Culture supernatants were collected at 18 and 48 hours. Consistent with findings from FIGS. 7A-7J, IFN-γ levels were elevated in the presence of each APC lineage, as well as in the absence of APCs, suggesting that IFN-γ was produced by activated CAR T cells independent of APCs (FIG. 8A). Levels increased marginally after 48 hours of culture. GMCSF levels demonstrated a significant increase between the 18 and 48-hour time points, with cultures containing immature dendritic cells producing the most GMCSF, followed by mature DCs and then macrophages (FIG. 8B). Activated T cells alone produced very little GMCSF, as did cultures of activated T cells with monocytes, suggesting that GMCSF secretion was driven by differentiated monocyte-lineage cell populations. IL-2 levels demonstrated a large peak at the 48-hour time point when activated T cells were combined with mature dendritic cells, and a smaller but significant peak when T cells were combined with macrophages (FIG. 8C). Low-levels of IL-2 were detected after 48 hours when T cells were combined with targets alone or in the presence of immature dendritic cells, but the presence of monocytes did not appear to result in significant IL-2 production. While some low-level IL-8 was detected in nearly all cultures containing APCs, a 1000× increase was detected when activated T cells were combined with macrophages as compared to T cells and targets alone at the 18-hour time point (FIG. 8D). The presence of immature dendritic cells also yielded high IL-8 levels at 18 hours, with more modest elevations in the monocyte cultures. The presence of mature dendritic cells did not significantly alter IL-8 concentration. Finally, IL-6 levels were observed to be highest when activated T cells were combined with immature dendritic cells after 48 hours of culture, with a greater than 100× increase in cytokine concentration (FIG. 8E). Modest elevations were detected in cultures containing activated T cells and mature DCs and macrophages. Nearly no IL-6 was detected in the absence of APCs, but a low level was produced in the absence of targets (T cells and immature DCs alone); these levels were several logs below those observed when CAR T cells were combined with targets and APCs.

### APC-Produced IL-6 Did not Impact CAR T Cell Transcription or Cytotoxicity

[1123] Experiments were performed to determine which cell type (APC or CAR T cell) was responsible for cytokine secretion in these co-cultures. Trans-well co-culture experiments were conducted, and Nanostring transcriptional analysis was performed on discrete cell populations. The transcriptional profiles of activated T cells in the presence or absence of APCs were examined. As depicted by regression analysis of 697 genes related to immune activation, there was no detectible difference in transcriptional profile (FIG. 9A, R²=0.951, p>0.5). The profiles of APCs alone to APCs combined with untargeted T cells and Nalm-6 leukemia were also examined. There was no change in APC transcriptional profile (FIG. 9B, R²=0.934, p>0.5). Additionally, APC transcription profiles when combined with untargeted T cells and Nalm-6 or CD19 CAR T cells and Nalm-6 were compared. There was significant variability in APC transcriptional profiles (FIG. 9C, R²=0.830, p=0.0017). These data demonstrate that APCs had no effect on T cell transcription, but that CAR-activated T cells and not un-activated T cells significantly altered APC transcriptional phenotypes. From the same trans-well studies, Nanostring analysis was used to map RNA constructs to their cell of origin. IFN-γ was made exclusively by T cells, IL-2 and GMCSF were predominantly made by T cells, IL-8 was predominantly made by APCs, and IL-6 was exclusively made by APCs (FIG. 10), confirming the cellular origins of these CRS-associated cytokines.

[1124] To evaluate if CD19 CAR T cell activity was altered by IL-6 in a transcription-independent manner, co-culture experiments were performed and T cell cytotoxic activity was evaluated. Targets, APCs and T cells were combined as described above and T cells were harvested after 18 hours of co-culture. To control for the effects that non-specific CAR signaling may have on cytotoxicity assessment, T cells were engineered to express either no CAR (FIG. 11A), a CAR directed at the irrelevant antigen GD2 (FIG. 11B) or the CD19 CAR (FIG. 11C). Cytotoxicity was measured by upregulation of CD107a, a measure of T cell degranulation. No degranulation was detected when untargeted T cells or GD2 CAR T cells are combined with targets, while degranulation was detected when CD19 CAR T cells encounter CD19+ leukemia. There was no detectable difference in degree of degranulation based on the presence or absence of APCs.

### Transcriptional Analysis of Clinical CD19 CAR T Cell Samples Revealed Distinct Clustering of Grade 2-3 Versus Grade 4 CRS

[1125] Cytokine analysis of patients who have received CD19 CAR T cell therapy for leukemia demonstrated that while many cytokines are elevated during CRS, only a few contribute to a predictive model of which patients will go on to develop grade 4 CRS after T cell infusion (Teachey Cancer Discovery 2016). Peripheral blood and isolated mononuclear cells (PBMCs) were collected from patients who had received CD19 CAR T cell therapy for treatment of ALL as part of a phase I clinical trial on their first day of fever after T cell infusion. Seven of ten patient samples had detectable peripheral CAR T cells, and of these patients, three experienced grade 2 CRS, one grade 3, and three grade 4. The remaining three samples had no detectable peripheral T cells, but only circulating ALL cells; of these patients, two were classified as grade 4 CRS and one grade 3. Unsupervised clustering analysis was performed on these samples; distinct transcriptional profiles were determined for grade 2-3 and grade 4 CRS (FIG. 12). T cells from patients that developed grade 4 CRS had elevations in granzyme B, perform, IFN-γ, Zap70, EOMES and Lag-3 transcripts, and suppressed levels of tumor necrosis factor-α, IL-1β and CCR7 as compared to those with grade 2-3 CRS. B cell transcripts, such as CD79, Pax5 and CD19, were only elevated in the three samples with circulating leukemia.

### CD19 CAR T Cells Did not Produce IL-6 in Patients Experiencing CRS

[1126] Having demonstrated that CAR T cells did not produce IL-6 in vitro, experiments were performed to confirm this finding in a relevant clinical context. Transcriptional analysis of patients experiencing fever who went on to develop CRS revealed that none of the samples containing CAR T cells demonstrated detectable levels of IL-6 transcript, with all IL-6 transcript levels measuring below the lower-limit of detection (<1 copy of RNA transcript per cell, FIG. 12). Similarly, no samples containing only leukemia cells had detectable levels of IL-6, confirming that in these patients neither the T cells nor leukemia were responsible for IL-6 production. Examination of the T cells from this collection using light microscopy demonstrated a highly activated phenotype, with large, irregular nuclei, open chromatin and irregular plasma membranes (FIG. 13).

### Discussion

[1127] There has been a lack of mechanistic understanding of CRS, e.g., CRS associated with CAR T cell therapiesThe results herein provide biological insight into the source of IL-6 and the role it has in CAR T cell activity. In particular, the results herein demonstrated that monocyte-lineage APCs produced IL-6 in response to CAR-mediated T cell recognition of target leukemia, and that T cell transcriptional and cytotoxic activity were not affected by the presence of IL-6.

[1128] These findings demonstrated that monocyte-derived immature dendritic cells yielded the greatest IL-6 signal in response to CAR-mediated T-cell activation. The identification of the cellular source of IL-6, along with the confirmation that CD19 CAR T cells from patients did not produce IL-6, highlights a central physiology of this syndrome. The results herein included observation of higher levels of IL-6 when APCs were combined with targets in the presence or absence of un-activated T cells when T cells and APCs were separated in the trans-well setting. One explanation could be that direct cell:cell contact between targets and APCs may inhibit secretion of IL-6, via inhibitory signaling based on cell-surface co-receptors. Alternatively, the micropore material of the trans-well insert may provide non-specific stimulation to the APCs that is not delivered by the inert plastic of the traditional plate well, and that this stimulation may result in enhanced IL-6 secretion. The overall pattern, however, remained the same, with the only statistically-relevant increase in IL-6 secretion resulting from the combination of CD19 CAR T cells, targets and APCs, suggesting that IL-6 secretion by APCs is stimulated not by cell:cell contact, but instead by a soluble factor present when CAR T cells kill targets.

[1129] Transcriptional mapping using the trans-well system allowed for identification of the cellular sources of all cytokines evaluated. IFN-γ was produced by T cells only, consistent with the findings from cytokine quantitation presented in FIG. 8. IL-2, GMCSF and IL-8 were produced by both cell populations, albeit with clear predominance of APCs or T cells for each molecule. Low levels of IL-2 were derived from APCs, with the predominance coming from T cells. Examination of secretion patterns from FIG. 8 demonstrated that when CAR T cell were combined with targets, IL-2 levels were ˜40000 pg/mL at 48 hours, similar to that seen with CAR T cells and targets were combined with monocytes and immature dendritic cells. The presence of mature dendritic cells and macrophages, however, resulted in significantly greater IL-2 levels, nearing 160000 pg/mL, a 4-fold increase. While these differences in concentration were not entirely correlated to the differences in transcription, it is possible that the monocyte lineages responsible for IL-2 production were mature dendritic cells and macrophages. Several possibilities may explain the significant differences in cytokine quantity not explained by transcriptional differences. Altered receptor expression or recycling on the part of the APCs may cause a fluctuation in the soluble IL-2 present at time of collection. Alternatively, APCs may secrete other soluble factors that enhance stability or lower consumption of IL-2. GMCSF demonstrated a nearly identical pattern, with increased secretion when activated T cells were combined with APCs, and transcriptional evidence of two cellular sources. In this case, immature dendritic cells appeared to be the source of APC-derived GMCSF, with mature DCs and macrophages also contributing. Detection of IL-8 at the protein level only occurred when activated T cells were combined with APCs, with very low levels detected when T cells were alone or with targets, while transcriptional analysis demonstrated two cellular sources. APC IL-8 transcript levels were ˜4_{log} greater than T cell transcript levels, which may explain these dynamics. IL-2 and GMCSF transcripts both demonstrated a ˜2_{log} discrepancy. Finally, IL-8 was the only cytokine that demonstrated significantly greater levels at the 18 hour time point, with all others peaking at 48 hours, suggesting that IL-8 may be an early component of the CRS cascade.

[1130] Maude et al. described the vast majority of patients with ALL reported to have developed cytokine release syndrome, with 27% experiencing severe CRS requiring tocilizumab (Maude NEJM 2015). Anti-IL-6R therapy has been effective in managing this toxicity, and in the majority of cases has led to a rapid clinical improvement. The patient whose cells were used in the study in this Example experienced a rapid improvement of an ongoing respiratory and hemodynamic insufficiency. The decision to invoke anti-IL-6 therapy has been at the discretion of the clinical trial team, as the effect of disrupting IL-6 signaling on CAR T cell activity has remained unknown. These findings herein demonstrate that monocyte-lineage derived IL-6 does not alter CAR T cell transcriptional signatures, and that this transcriptional stability corresponds to stability of cytotoxic function. The results herein suggest that APCs and APC-produced IL-6 are not necessary for CAR T cell activity in vivo, and are likely bystanders that do not play a role in target killing in vivo. These findings suggest that abrogation of IL-6 signaling after CAR T cell infusion should have no impact on anti-tumor response. Conclusion

[1131] Management of CRS following CD19 CAR T cell therapy has largely been empiric given the limited biological understanding of this syndrome. The results herein demonstrate that CAR T cells do not produce IL-6 (rather, they are produced by APCs), and that the presence of IL-6 does not alter T cell transcriptional activity or cytotoxicity. These results allow for more informed use of anti-IL-6 therapies to control the significant morbidity associated with toxicity from CRS while preserving the efficacy of the CAR T cell therapy. The data herein can support the blocking of IL-6 before symptoms of CRS appear without changing CART19 efficacy. Based on the data herein, a clinical trial has been designed to allow for early administration of tocilizumab following CD19 CAR T cell therapy. The clinical trial is described in greater detail in Example 4 below. The early administration of tocilizumab (e.g., before or soon after CRS symptoms occur) may significantly reduce the incidence of CRS toxicity while maintaining robust anti-tumor efficacy.

### Example 4: A Phase 2, Two Cohort Study of the Tocilizumab Optimization Timing for CART19 (CTL019) Associated Cytokine Release Syndrome (CRS) Management in Pediatric Patients with CD19 Expressing Relapsed/Refractory B-Cell Acute Lymphoblastic Leukemia (ALL)

[1132] Clinical Experience with Tocilizumab

[1133] Toxicities such as CRS and macrophage activation syndrome (MAS) have been observed in CART19 patients (162 patients receiving the product in 7 studies that include adult and pediatric and lymphomas as of May 2015). CRS has been the most significant SAE seen in adult and pediatric patients treated with CTL019. CRS typically begins within 2 weeks of CART19 infusion and it starts with several days of fevers. In all cases, evaluation for infections is done. Fevers tend to be spiking and can be associated with rigors, anorexia, nausea, diarrhea, diaphoresis, capillary leak, hypoxia and hypotension. In 25-30% of case ICU level care, ventilator support and pressors have been needed. Observations have noted highly elevated IL-6 concentrations during CRS. In addition, the reaction typically appears to be associated with MAS. This can be manifest by evidence of elevated ferritin, but can also be associated with hypofibrinogenemia, cytopenias, altered mental status, and other complications.

[1134] Tocilizumab is an anti-IL6 receptor antibody and has been administered at a dose of 8-12 mg/kg on CHP959. In many cases, CRS has been severe but reversible. However there have been several cases of refractory CRS that resulted in death in adult patients, generally complicated by resistant infections at the same time. The risk of CRS is highly significantly related to tumor burden, so that treating patients with less tumor burden may result in less severe cytokine release syndrome. However, additional contributory patient and CART19-related factors cannot be ruled out.

[1135] Since CRS mechanistically is a required part of the antitumor mechanism of in vivo CART19 cell expansion and tumor killing, tocilizumab has been administered for CRS with worsening respiratory distress, including hemodynamic instability despite intravenous fluids and moderate vasopressor support, rapid clinical deterioration, pulmonary infiltrates, increasing oxygen requirement including high-flow oxygen and/or need for mechanical ventilation.

[1136] CRS/MAS were successfully managed in the majority of patients with supportive care when this toxicity was mild or moderate and with anti-cytokine therapy like tocilizumab plus supportive care. Severe CRS/MAS has responded rapidly (often in hours) to the administration of tocilizumab as needed in all CLL, NHL and pediatric ALL patients treated to date.

[1137] In pediatric patients with ALL treated under CHP959 and the Novartis-UPenn multisite trial B2205J, CRS of grades 1-4 was reported for 62 (89.8%) patients. 21 of 62 patients (33.8%) required anticytokine therapy. CRS was reversible in all patients but one patient with administration of 1 to 3 doses of tocilizumab. In adult patients with ALL treated under in the Penn study B2102J CRS was reported in all patients. Fifty percent of these patients required anti-cytokine therapy (one or two tocilizumab doses), which led to complete resolution of CRS.

### Impact of Tocilizumab on CART19 Expansion

[1138] Graphical exploration of CART19 cellular kinetics in 25 pediatric ALL patients (CHP959, B2205J, and B2202) did not suggest an impact of tocilizumab on CART19 expansion. In two examples of pediatric ALL patients from a clinical study, CHP959 (a phase I clinical study of pediatric ALL patients given CART19), sampled qPCR assessments showed that the rate of expansion of CART19 cells appeared similar before and after administration of the first dose of tocilizumab when administered per the criteria of the CRS treatment algorithm described herein.

[1139] In preliminary analyses to date (n=25 pediatric ALL patients), no discernable impact of tocilizumab on the rate of expansion based upon a nonlinear mixed effect model has been detectable.

### Impact of Tocilizumab on Anti-Tumor Activity

[1140] In patients treated in CHP959, 100% of patients that were treated with tocilizumab for grade 4 CRS subsequently went into remission. Patients treated with tocilizumab achieving a CR/CRi tended to have a 2-fold higher T-cell exposure (AUC28d) compared with patients that were not treated with tocilizumab (data not presented), however, this did not impact the clinical response. Additional factors characterized patients that received tocilizumab, including greater severity of CRS, which in turn correlated with higher tumor burden just prior to CART19 cell infusion. Within the CR/CRi responses subgroup (n=46) of CHP959, fewer patients (n=15) received tocilizumab than did not receive (n=31). Another on-target effect that was seen only in responding patients was the depletion of normal CD19+ B cells. See, e.g., Grupp et al. N. Engl. J. med. 2013; and Porter et al. N. Engl. J. Med 2011; 365(8):725-33. Preliminary comparison of the duration of remission (DOR) of patients who received tocilizumab versus those who did not receive tocilizumab suggests no impact on CART19 tumor efficacy when administered via the standard CRS treatment algorithm, e.g., treatment algorithm described herein.

### Summary of the Phase 2 Study

[1141] This example describes a phase 2, two cohort, open-label study to describe the efficacy of administration timing of tocilizumab on CART19 (CTL019) associated CRS safety events in pediatric patients with CD19 expressing relapsed and refractory B-cell acute lymphoblastic leukemia with high versus low pre-infusion tumor burden following redirected autologous T cells transduced with the anti-CD19 lentiviral vector (CART19/CTL019).

[1142] The primary objective of this study is to describe the frequency of grade 4 CRS. The secondary objectives are:

1. To describe the tumor response as assessed by Day 28 rate of CR with MRD negative bone marrow and by the duration of remission
2. To describe the CART19 (CTL019) cellular kinetics; and
3. To describe additional safety endpoints. 3
The exploratory objectives are:
1. To compare rate of CART19 (CTL019) expansion before and after first tocilizumab dose; and
2. To describe the profile of soluble immune factors that may be key to cytokine release syndrome.

[1143] Inclusion criteria are designed to include pediatric patients aged 1-24 years with CD19 expressing relapsed/refractory B-cell acute lymphoblastic leukemia (ALL).

[1144] The study product is CART-19 cells transduced with a lentiviral vector to express either anti-CD19ζ scFv TCζ:41BB, administered by i.v. injection using an intra-patient dose escalation approach: 10% on day 0, 30% on day 1 with a total dose goal of ˜1.5×10⁷-5×10⁹ (˜0.3×10⁶-1.0×10⁸/kg) T cells.

[1145] Two cohorts are defined based upon pre-infusion high versus low tumor burden; with the high tumor burden cohort to receive protocol defined early anti-cytokine intervention (i.e. tocilizumab) for CRS management and the low tumor burden cohort to receive standard anti-cytokine intervention (i.e. tocilizumab) for CRS.

[1146] The duration of CART-19 administration will be based on the total volume to be infused and the recommended infusion rate of 10-20 mL per minute. The transduced T cells will be administered by slow IV push. T cells are expected to persist at detectable levels in circulation for months or longer in many patients.

### Dose and Treatment Regimen

[1147] A dose of 1.5×10⁷-5×10⁹ cells or 0.3×10⁶-1.0×10⁸/kg of CART19 cells will be used. Because there are about 1×10¹² T cells in a healthy adult (equivalent to 2×10¹⁰ T cells/kg), the proposed total (100%) dose is equivalent to about 0.5% of the total body mass of T cells. Therefore, the initial frequency of cells to be present should be at about 0.5% at baseline following infusion. As an additional safety feature, the cells will be administered using a split dosing approach as described in the “CART19 transduced T cells administration” section below.

### CART19 Transduced T Cells Administration

[1148] CART19 T cells will be given, up to a total dose of 1.5×10⁷-5×10⁹ (0.3×10⁶-1.0×10⁸/kg) total cells. The actual number of transduced CART19 cells administered will depend upon transduction efficiency. The following schedule will be used:

[1149] Day 0: “10%”-1.0×10⁷/kg

[1150] Day 1: “30%”-3.0×10⁷/kg if patient is clinically stable from prior day's infusion

If the target dose is not achieved in manufacturing, a product that meets all release criteria may be infused. The toxicities that would preclude the next dose of T cells are fever or clinical instability. Toxicities attributable to the prior chemotherapy, such as cytopenias, will not impact infusion in a stable patient.

[1151] Timing and Doses of Subsequent CART-19 Infusions

[1152] For patients who have had i) evidence of brief B cell aplasia with subsequent B cell recovery (suggesting rapid CAR clearance), or ii) fever and other reversible toxicities without evidence of CAR expansion/LGLs or response, or iii) no response, or a partial or temporary response to the initial infusion, it may be that the initial dose of cells was not adequate to produce a full therapeutic effect, or the cells may not have persisted long enough to produce longer-term disease control. In these cases, it may be appropriate to give more CART-19 cells (subsequent infusions). Subsequent infusions will be given no earlier than Day 14.

[1153] It is possible that a subject's cumulative dose could exceed 100% of the dose specified above. More than 100% of the cell dose may be given in aliquots to sustain an initial response or address rapid CAR clearance (as evidenced by e.g. B cell recovery) if the cells grew well and a sufficient number are available. In this scenario, additional doses of 30% (if available) would be given at 2 week+ intervals. The rationale for this dosing regimen is that there does not appear to be a significant dose-response relationship with the initial dose. We have observed varying and significant degrees of cell expansion post infusion, making the amount of the infused cells less relevant. Thus, the multiple doses given over time may be more efficacious in sustaining a response. In terms of safety, the worst toxicities have been observed with the first infusion. There has been a minimal toxicity with subsequent infusions in the few patients that have received them. Therefore, we consider the potential benefits of administering a greater cell dose over time to outweigh the potential risks. However, the cumulative dose will not exceed 1.5×10⁸/kg administered over time in several doses.

### Study Design

[1154] The study will have three sequential phases: 1) a screening phase, 2) a manufacturing and pre-treatment phase, including apheresis (if applicable) and chemotherapy (if applicable), and 3) a treatment phase, including a CART19 transfused cell infusion and follow up evaluations.

[1155] Once patient eligibility is confirmed, patients who do not have apheresis product suitable for manufacturing will have cells collected by leukapheresis to obtain peripheral blood mononuclear cells (PBMC) for this purpose. Cells will be transduced with the anti-CD19 TCζ/4-1BB lentiviral vector, expanded in vitro and then frozen for future administration. Cryopreserved historical apheresis products collected from the patient prior to study entry are usable for CART19 manufacturing if collected at an appropriately certified apheresis center and the product meets adequate mononuclear cell yields. If a historical apheresis product is not available, an apheresis procedure will be scheduled for cell procurement after study entry.

[1156] Unless contraindicated and medically not advisable based on previous chemotherapy, patients will be given conditioning chemotherapy prior to CART19 cell infusion with the intent of lymphodepletion. Additionally, if the patient's white blood cell (WBC) count is ≤1,000/uL, conditioning/lymphodepleting chemotherapy is not required. The chemotherapy will be planned so that the last dose is completed 1-4 days before the planned infusion of CART19 cells. The chemotherapy start date will vary based on the duration of the selected chemotherapy regimen. If the period from chemotherapy to CART19 infusion is delayed for 4 weeks or more, the patient will need to be re-treated with lymphodepleting chemotherapy prior to CART19 infusion.

[1157] Two study cohorts are planned as defined by tumor burden (TB) (defined by the highest blast percentage measured by differential of a bone marrow aspirate or biopsy or multiparameter flow cytometry for MRD) at the timepoint just preceding CART19 infusion:

[1158] 1. Cohort A: Patients with ≥40% blasts in the bone marrow at pre-infusion (˜Day −5 to −1) will be enrolled in the early tocilizumab cohort and will follow early CRS treatment algorithm.

[1159] 2. Cohort B: Patients with <40% blasts in the bone marrow at pre-infusion (˜Day −5 to −1) will follow the standard CRS Rx algorithm.

### Patient Inclusion Criteria

[1160] Patient inclusion criteria includes the following:

1. Relapsed or refractory B-cell ALL:
[1161] a. 2nd or greater relapse (marrow or CNS) OR
[1162] b. Any relapse after allogeneic HSCT and ≥6 months from SCT at infusion OR
[1163] c. Any relapse after CAR-modified T cell therapy OR
[1164] d. Refractory disease defined as having not achieved an MRD-negative CR after >2 chemotherapy regimens/cycles (1 cycle for relapsed patients) OR
[1165] e. Patients with Ph+ ALL are eligible if they are intolerant to or have failed tyrosine kinase inhibitor therapy OR
[1166] f. Ineligible for allogeneic SCT because of: i. Comorbid disease
   [1167] ii. Other contraindications to allogeneic SCT conditioning regimen
   [1168] iii. Lack of suitable donor
   [1169] iv. Prior SCT
   [1170] v. Declines allogeneic SCT as the therapeutic option after documented discussion, with expected outcomes, about the role of SCT with a BMT physician not part of the study team
[1171] g. Patients with CNS3 disease will be eligible if CNS disease is responsive to therapy (at infusion, must meet criteria in Section 5.2)
   2. Documentation of CD19 tumor expression in bone marrow or peripheral blood by flow cytometry at relapse (or a recent marrow in the case of refractory disease). If the patient has received CD19-directed therapy (i.e. blinatumomab), then the marrow should be obtained after this therapy to show CD19 expression.
   3. Adequate organ function defined as:
[1172] a. A serum creatinine based on age/gender as follows:

TABLE 21A
Serum creatinine based on age and gender
Maximum Serum Creatinine (mg/dL)

| Age | Male | Female |
|---|---|---|
| 1 to <2 years | 0.6 | 0.6 |
| 2 to <6 years | 0.8 | 0.8 |
| 6 to <10 years | 1.0 | 1.0 |
| 10 to <13 years | 1.2 | 1.2 |
| 13 to <16 years | 1.5 | 1.4 |
| ≥16 years | 1.7 | 1.4 |

[1173] b. ALT<500 U/L
[1174] c. Bilirubin<2.0 mg/dl d. Must have a minimum level of pulmonary reserve defined as ≤Grade 1 dyspnea, pulse oximetry>92% on room air; DLCO>40% (corrected for anemia) if PFTs are clinically appropriate as determined by the treating investigator e. Left Ventricle Shortening Fraction (LVSF)≥28% or Ejection Fraction (LVEF)≥40% confirmed by ECHO, or adequate ventricular function documented by a scan or a cardiologist.
   5. Evidence of disease by standard morphologic or MRD criteria. A clinical marrow showing disease may be performed at enrollment or within 12 weeks of enrollment.
   6. Age 1-24 years.
   7. Adequate performance status (Lansky or Karnofsky score ≥50).
   8. Subjects of reproductive potential must agree to use acceptable birth control methods.

### CART19 Product Infusions

[1175] The transduced T cells will be administered by slow IV push. No more than 10 mL/kg of total volume will be delivered to the patient. The duration of CART-19 administration will be based on the total volume to be infused and the recommended infusion rate of 10-20 mL per minute.

[1176] Vital signs (temperature, respiration rate, pulse, blood pressure, and oxygen saturation as clinically indicated) will be measured within 10 minutes prior to the infusion, within 10 minutes after the infusion, and then every 15 minutes for at least one hour. If the subject's vital signs are not satisfactory and stable one hour post-CART19 infusion, vital signs will continue to be monitored every hour or as clinically indicated. The subject will be discharged after the physician managing their care on the day of each infusion has determined that they are in satisfactory condition.

### Febrile Reaction

[1177] In the event of febrile reaction, an evaluation for infection should be initiated, and patients managed appropriately with antibiotics, fluids and other supportive care as medically indicated and determined by the treating physician. In the event that the patient develops sepsis or systemic bacteremia following the CAR T cell infusion, appropriate cultures and medical management should be initiated. If a contaminated CART19 T cell product is suspected, the product can be retested for sterility using archived samples that are stored in the CVPF. Consideration of CRS as the most likely etiology should be given.

### Assessment of Laboratory Parameters for CRS

[1178] Hematology, coagulation and chemistry safety assessments will be performed at study visits. Side effects following CART19 cell infusions can induce high fevers and should be expected. If high fevers (≥101.5° F./38.6° C.) occur following CART19 infusion, it is recommended that ferritin, LDH and CRP levels be monitored QD until resolution of the fever (below 101.5° F./38.6° C.). Other chemistry parameters should be monitored or as clinically indicated if CRS is suspected.

### Cytoreductive/Lymphodepleting Chemotherapy

[1179] Prior to CART19 cell infusion, an additional chemotherapy cycle is planned. While the choice of chemotherapy will be at the investigator's discretion depending on the patient's underlying disease and prior therapies, fludarabine (30 mg/m2/day×4 days) and cyclophosphamide (500 mg/m2/day×2 days) are the preferred agents, as there is the most experience with the use of these agents in facilitating adoptive immunotherapy on the ongoing pediatric murine CART19 study CHP959.

[1180] The lymphodepleting chemotherapy prior to CART19 cell infusion is not required if patient's WBC≥1,000/uL. Additionally, if the period between chemotherapy and CART19 infusion is delayed 4 or more weeks, the patient may need to be re-treated with lymphodepleting chemotherapy prior to CART19 infusion.

[1181] The chemotherapy will be planned so that the last dose is completed 1-4 days before the planned infusion of CART19 cells for ALL. Each regimen is of different duration so the start day of chemotherapy will vary. The purpose of the chemotherapy is to induce lymphopenia in order to facilitate the engraftment and homeostatic expansion of CART19 cells. In addition, chemotherapy is intended to control the ALL. The chemotherapy is not investigational and may be given by a patient's local oncologist within the specified time frame.

### CART19 (CTL019) Infusions

[1182] Subject infusions are to begin 1 to 4 days after completion of chemotherapy as indicated in the “Cytoreductive/Lymphodepleting chemotherapy” section herein.

[1183] Subjects will undergo tests and procedures in accordance with a Visit Evaluation Schedule. This includes a CBC with differential prior to each infusion, as well as an assessment of CD3, CD4 and CD8 counts prior to the 1st infusion since chemotherapy is given in part to induce lymphopenia. CART19 cells will be infused as described above in the Dose/Treatment Regimen section.

### Tumor Burden Based CRS Management

[1184] Two study cohorts are planned as defined by tumor burden at the time just preceding CART19 infusion:

[1185] a) Cohort A: Patients with ≥40% blasts in the bone marrow at pre-infusion (˜Day −5 to −1) will be enrolled in the early anti-cytokine cohort and will follow early CRS management algorithm.

[1186] b) Cohort B: Patients with <40% blasts in the bone marrow at pre-infusion (˜Day −5 to −1) will follow the standard CRS management algorithm.

### Efficacy Assessments

[1187] Tumor response assessments will be done at baseline (prior to CART19 infusion) and then at Day 28 and Months 3, 6, 9 and 12 after CART19 cell infusions or until the patient requires alternative therapy for their disease. Assessments will be made as clinically indicated by physical exam, chest x-ray (if clinically indicated), CSF evaluation, hematology blood panel, and bone marrow biopsy and aspirate.

[1188] Disease assessment collection plan is detailed in Table 21B.

TABLE 21B
Disease Assessment Collection Plan
(assessments are all standard of care)

| | Pre-Infusion | Post Infusion |
|---|---|---|
| Procedure | Assessments | Assessments |
| Bone marrow aspirate and | Mandated | Day 28, Months 3, 6, 9 and |
| biopsy for blast cell counts | within 12 | 12 |
| | weeks of | |
| | enrollment | |
| Peripheral Blood for blast, | Mandated | Day 28, Months 3, 6, 9 and |
| neutrophil and platelet cell | | 12 |
| counts | | |
| CSF Assessment for CNS | Mandated | Day 28, Months 3, 6, 9 and |
| disease | | 12 |
| Physical Exam for | Mandated | If clinically indicated |
| extramedullary disease | | |
| MRD assessment of bone | Mandated | Day 28, Months 3, 6, 9 and |
| marrow by flow cytometry | | 12 |
| (every patient) | | |
| BCR-ABL assay of blood | Mandated | Day 28, Months 3, 6, 9 and |
| and bone marrow aspirate | | 12 |
| for patients with Ph+ ALL | | |

### Physical Exam

[1189] A physical examination will be used to assess evidence of extramedullary disease in the liver, spleen, lymph node, skin, gum infiltration, testicular involvement and other sites if applicable. Extramedullary involvement is to be assessed at screening and will be followed as clinically appropriate.

### Bone Marrow Aspirate/Biopsy and Peripheral Blood

[1190] Bone marrow biopsies and aspirate will be measured for tumor evaluations and efficacy analysis.

### Cerebrospinal Fluid (CSF) Assessment

[1191] If CNS symptoms are present at Screening/Enrollment, a lumbar puncture will be performed to assess CNS leukemic involvement. CSF will be assessed at baseline (Day −1) and on Day 28. CSF will be analyzed for cell count and differential, cytology, and for the presence of CART19 cells. Additionally, CSF may be assessed as clinically indicated during the height of cytokine release syndrome (CRS).

### Extramedullary Disease

[1192] If extramedullary disease is present prior to treatment, this will be followed as clinically appropriate.

### Minimal Residual Disease (MRD)

[1193] All patients will have multiparameter flow cytometry on bone marrow aspirate for MRD status at each time point a bone marrow aspirate is performed.

### Quantitative BCR-ABL: Ph+ ALL Patients

[1194] Bone marrow aspirates sampled at the time points for tumor assessments will additionally be analyzed for quantitative BCR-ABL levels for Ph positive ALL patients only.

### ALL Response Criteria

[1195] The response criteria will be evaluated accordingly to the Table 21C. The definitions are primarily based on the standardized response criteria defined by National Comprehensive Cancer Network (NCCN) Guidelines (NCCN, 2013 v.1) and further supported by the workshop report from American Society of Hematology (ASH) and the International Working Group (IWG) guideline for acute myeloid leukemia (AML). The Cheson IWG guideline and Appelbaum ASH report were used in recent drug approvals (e.g. Marqibo) in ALL, prior to the NCCN guideline availability. The NCCN guidance is a more recently published updated US based guideline for ALL.

[1196] Efficacy assessments will be performed based on bone marrow and blood morphologic criteria, physical examination findings, along with laboratory assessments of CSF and bone MRD assessment. The overall disease response is determined at a given evaluation using the criteria described in Table 21C.

TABLE 21C
Overall disease response classification at a given evaluation time

| Response category | Definition |
|---|---|
| Complete remission (CR) | All the following criteria are met: |
| | Bone marrow |
| | Trilineage Hematopoiesis (TLH) and <5% blasts |
| | Peripheral blood |
| | Neutrophils >1.0 × 109/L, and |
| | Platelets >100 × 109/L, and |
| | Circulating blasts <1% |
| | Extramedullary disease |
| | No evidence of extramedullary disease (no CNS disease, |
| | mediastinal disease CR, no other extramedullary sites |
| | involvement) |
| | Transfusion independency |
| | No platelet and/or neutrophil transfusions within 1 week |
| | before peripheral blood sample for disease assessment |
| Complete remission with | All criteria for CR as defined above are met, except that |
| incomplete blood count | the following exist: Neutrophils ≤1.0 × 109/L, or |
| recovery (CRi) | Platelets ≤100 × 109/L, or |
| | Platelet and/or neutrophil transfusions within week |
| | before peripheral blood sample for disease assessment |
| Complete remission (CR) | All criteria for CR or CRi as defined above are met, |
| with residual mediastinal | except that mediastinal disease as defined by CRu or PR |
| disease | is observed: |
| No response (Treatment | Failure to attain the criteria needed for any response |
| failure) | categories |
| Relapsed Disease | Only in patients with a CR or CRi: |
| | Reappearance of blasts in the blood (≥1%), or |
| | Reappearance of blasts in bone marrow (≥5%), or |
| | (Re-)appearance of any extramedullary disease after CR |
| Unknown | In case the response assessment was not done, the |
| | baseline assessment was not done, the assessment was |
| | incomplete or was not done within the respective time |
| | frame. If there is evidence of relapse, the overall |
| | response will assessed as relapse with the relapsed |
| | component alone. |

The NCCN guideline has defined mediastinal response criteria including CRu and PR. In the case a patient achieves CR or CRi at all other non-mediastinal disease sites, and has residual mediastinal disease (CRu or PR), a category for overall disease response of CR or CRi with residual mediastinal disease has been included in this document, which is not part of the NCCN guidance.
The NCCN guidance has defined a progressive disease (PD) category. In this document, PD is considered the same as “No response” or “Treatment failure”, which is consistent with the Cheson et al. (2003) guideline. The difference between PD and “No response” in ALL is not believed to be clinical meaningful.

### Recording of Adverse Events

[1197] Adverse events will be recorded.

### Grading System of Cytokine Release Syndrome

[1198] Recipients of CART19 cells may develop CRS. Data from a small number of patients shows marked elevations in IL6, IFN-g, and less intensely TNF. Elevations in clinically available markers of inflammation including ferritin and CRP have also been observed to correlate with the clinical CRS syndrome.

[1199] Symptoms usually occur 1-14 days after cell infusion, but the syndrome is not defined by the timing of the reaction. Patients developing any symptoms attributable by the investigator as related to cytokine release should be reported has having a CRS. Symptoms may include, e.g., high fevers, rigors, nausea, vomiting, anorexia, fatigue, headache, myalgia/arthralgia, hypotension, dyspnea, tachypnea, hypoxia, altered mental status, end organ dysfunction, and signs of MAS including elevated ferritin.

[1200] For the purposes of reporting and grading on clinical trials using CART19 cells, we will use the following grading for CRS Toxicity. The start date of CRS is a retrospective assessment of the date of onset of persistent fevers and/or myalgia consistent with CRS and not explained by other events (i.e. sepsis). The stop date of CRS is defined as the date when the patient has been afebrile for 24 hours and off vasopressors for 24 hours. Afebrile is defined as a temperature<38.0° C. (100.4° F.).

TABLE 21D
CRS grading criteria
CRS Toxicity Grade (Modified)

| 1 | 2 | 3 | 4 | 5 |
|---|---|---|---|---|
| Mild | Moderate | More severe reaction: | Life-threatening | Death |
| reaction: | reaction | Hospitalization required for | complications such | |
| Treated with | requiring IV | management of symptoms | as hypotension | |
| supportive | fluids or | related to organ dysfunction | requiring high dose | |
| care such as | parenteral | including grade 4 LFTs or | pressors (see Table | |
| anti-pyretics, | nutrition; some | grade 3 creatinine related to | E), or hypoxia | |
| anti-emetics | signs of organ | CRS and not attributable to | requiring | |
| | dysfunction | any other conditions. This | mechanical | |
| | (i.e. grade 2 | excludes management of fever | ventilation | |
| | creatinine or | or myalgias. Includes | | |
| | grade 3 liver | hypotension treated with | | |
| | function tests | IVFs* or low-dose pressors, | | |
| | [LFTs] related | coagulopathy requiring fresh | | |
| | to CRS and not | frozen plasma (FFP) or | | |
| | attributable to | cryoprecipitate, and hypoxia | | |
| | any other | requiring supplemental | | |
| | condition). | oxygen (nasal cannula | | |
| | Hospitalization | oxygen, high flow oxygen, | | |
| | for | Continuous Positive Airway | | |
| | management of | Pressure [CPAP] or Bilateral | | |
| | CRS related | Positive Airway Pressure | | |
| | symptoms | [BiPIP]. Patients admitted for | | |
| | including | management of suspected | | |
| | fevers with | infection due to fevers and/or | | |
| | associated | neutropenia may have grade 2 | | |
| | neutropenia. | CRS. | | |

*CRS Grade 3 language clarification: “hypotension treated with intravenous fluids” is further defined as hypotension requiring multiple fluid boluses for blood pressure support.

TABLE 21E
High Dose Vasopressor Use Definition of
“High-Dose” Vasopressors

| | |
|---|---|
| Vasopressor | Dose for ≥3 hours |
| Norepinephrine monotherapy | ≥0.2 mcg/kg/min |
| Dopamine monotherapy | ≥10 mcg/kg/min |
| Phenylephrine monotherapy | ≥200 mcg/min |
| Epinephrine monotherapy | ≥0.1 mcg/kg/min |
| If on vasopressin | High-dose if vaso + Norepinephrine |
| | Equivalent (NE) of ≥0.1 mcg/min |
| | (using Vasopressin and Septic Shock |
| | Trial (VASST) formula) |
| If on combination vasopressors | Norepinephrine equivalent of ≥20 |
| (not vasopressin) | mcg/min (using VASST formula) |

Vasopressin and Septic Shock Trial (VASST) Equivalent Equation: Norepinephrine equivalent dose = [norepinephrine (mcg/min)] + [dopamine (mcg/kg/min) ÷ 2] + [epinephrine (mcg/min)] + [phenylephrine (mcg/min) ÷ 10]
Criteria from Russell et al, 2008.
Note:
Pediatric weight adjustments should be taken into consideration.

### Toxicity Management

### Febrile Reaction

[1201] In the event of febrile reaction, an evaluation for infection should be initiated, and patients managed appropriately with antibiotics, fluids and other supportive care as medically indicated and determined by the treating physician. In the event that the patient develops sepsis or systemic bacteremia following CAR T cell infusion, appropriate cultures and medical management should be initiated. If a contaminated CART19 T cell product is suspected, the product can be retested for sterility using archived samples that are stored in the CVPF. Consideration of CRS (see below) should be given.

### Cytokine Release Syndrome (CRS)/Macrophage Activation Syndrome (MAS)

[1202] High Tumor Burden Cohort (early tocilizumab)—patients with ≥40% blasts in bone marrow at pre-infusion (˜Day −5 to Day −1): Intervention with tocilizumab (8-12 mg/kg) will occur when 2 temperatures>38.5° C. occur within a 24 hour period measured at least 4 hours apart. If and when the patient experiences clinical CRS, the standard CRS treatment approach will then be used.

[1203] Low Tumor Burden Cohort—patients with <40% blasts in bone marrow at pre-infusion (˜Day −5 to Day −1), with clinical CRS will follow the CRS treatment algorithm outlined in Table 21F.

[1204] Tocilizumab should be used as a single, weight-based dose of 8-12 mg/kg at the time of hemodynamic instability. This management approach is designed to avoid life-threatening toxicities, so the timing of the tocilizumab should be individualized, in close consultation with the study team. Steroids have not always been effective in this setting and may not be necessary given the rapid response to tocilizumab. Because steroids will interfere with CART19 function and efficacy, if used, they should be rapidly tapered.

[1205] Upon developing the prodrome of high-persistent fevers following CART19 infusion, patients should then be followed closely. Infection and tumor lysis syndrome work up should be immediately undertaken. The pharmacy should be notified of the potential need for tocilizumab. Patient management in an intensive care unit may be required and the timing is dependent upon local institutional practice. In addition to supportive care, tocilizumab may be administered in cases of moderate to severe CRS, especially if the patient exhibits any of the following:
[1206] Hemodynamic instability despite intravenous fluid challenges and moderate stable vasopressor support
[1207] Worsening respiratory distress, including pulmonary infiltrates, increasing oxygen requirement including high-flow 02, and/or need for mechanical ventilation.
[1208] Any other signs or symptoms of rapid deterioration despite medical management

[1209] Not all Grade 4 CRS reactions following CART19 have been immediately treated with tocilizumab and decisions are, in part, based upon the rapidity of the syndrome onset and underlying patient reserve.

[1210] CRS has been associated with biochemical and physiologic abnormalities consistent with MAS. Moderate to extreme elevations in serum C-reactive protein (CRP) and ferritin have been seen with

[1211] CART19 associated CRS, however the magnitude and kinetics vary greatly between individual patients. CRS management decisions should be based upon clinical signs and symptoms and response to interventions, not these laboratory values per se.

[1212] CTCAE grading of CRS relates to its occurrence with acute infusional toxicities, whereas the CRS associated with CART19 therapy is not acute, but rather delayed.

TABLE 21F
CRS Treatment Algorithm

Pretreatment
Acetaminophen/paracetamol and diphenhydramine/H1 anti-histamine
Prophylaxis for complications of TLS as appropriate
CART19 infusion
Prodromal syndrome: low grade fevers, fatigue, anorexia (hours to days)
Observation, rule out infection (surveillance cultures)
Antibiotics per local guidelines (febrile neutropenia)
Symptomatic support
Symptom progression: High fevers, hypoxia, mild hypotension
1st Line Management:
Oxygen, fluids, low dose vasopressor support, antipyretics
Monitor/manage complications of TLS
Further symptom progression:
Hemodynamic instability despite intravenous fluids and moderate to “high dose”
vasopressor support OR
Worsening respiratory distress, including pulmonary infiltrates increasing oxygen
requirement including high-flow Oxygen (O2) and/or need for mechanical ventilation
OR
Rapid clinical deterioration
2nd Line Management:
Tocilizumab: IV infusion over 1 hour
Patient weight < 30 kg: 12 mg/kg i.v.
Patient weight ≥ 30 kg: 8 mg/kg i.v. (max dose 800 mg)
Hemodynamic and respiratory support
Lack of clinical improvement while awaiting tocilizumab response
3rd Line Management:
Consider other diagnosis causing clinical deterioration (i.e. sepsis, adrenal insufficiency)
If no improvement with 1st dose of tocilizumab within 12 to 18 hours, consider steroids
(plan rapid taper after hemodynamic normalization):
2 mg/kg methylprednisolone as an initial dose, then 2 mg/kg per day. As steroids are
tapered quickly, monitor for adrenal insufficiency and need for hydrocortisone replacement
If no response to steroids within 24 hours, consider 2nd dose of Tocilizumab (dosed as
above)
Hemodynamic and respiratory support
Lack of clinical improvement while awaiting response to 3rd line management
4th Line Management:
Consider other diagnosis causing clinical deterioration (i.e. sepsis, adrenal insufficiency)
If no response to steroids and 2nd dose of tocilizumab within 24 hours or further
clinical deterioration, consider
siltuximab 11 mg/kg IV over 1 hour
Hemodynamic and respiratory support
Lack of clinical improvement while awaiting response to 4th line management
5th Line Management:
Consider other diagnosis causing clinical deterioration (i.e. sepsis, adrenal insufficiency)
In ongoing CRS despite prior therapy, consider anti-T cell therapies such as
cyclophosphamide, anti-thymocyte globulin, or alemtuzumab
Hemodynamic and respiratory support

### CONCLUSION

[1213] Earlier administration of tocilizumab can decrease acute CART19 associated CRS severity (grade, duration of CRS or intensity of medical intervention) and at the same time it will not compromise antitumor efficacy of therapy with CD19 CAR T cells.

### EQUIVALENTS

[1214] The disclosures of each and every patent, patent application, and publication cited herein are hereby incorporated herein by reference in their entirety. While this invention has been disclosed with reference to specific aspects, it is apparent that other aspects and variations of this invention may be devised by others skilled in the art without departing from the true spirit and scope of the invention. The appended claims are intended to be construed to include all such aspects and equivalent variations.

We claim:

1. A composition comprising a JAK-STAT inhibitor (e.g., ruxolitinib), in combination with a CAR therapy (e.g., a CD123 CAR therapy), for use in preventing cytokine release syndrome (CRS), in a subject in need thereof.

2. A method of preventing cytokine release syndrome (CRS) with a CAR therapy (e.g., a CD123 CAR therapy) in a subject in need thereof, comprising administering a JAK-STAT inhibitor (e.g., ruxolitinib), in combination with the CAR therapy, to the subject, thereby preventing CRS in the subject.

3. A composition comprising:
(i) a cell, e.g., a population of immune effector cells, expressing, a chimeric antigen receptor (CAR), wherein the CAR comprises a CD123 binding domain, a transmembrane domain, and an intracellular signaling domain; and
(ii) a JAK-STAT inhibitor, e.g., ruxolitinib,
for use in treating a subject having a disease associated with expression of CD123.

4. A method of treating a subject having a disease associated with expression of CD123, comprising administering to the subject:
(i) a cell, e.g., a population of immune effector cells, expressing a chimeric antigen receptor (CAR), wherein the CAR comprises a CD123 binding domain, a transmembrane domain, and an intracellular signaling domain; and
(ii) a JAK-STAT inhibitor, e.g., ruxolitinib.

5. The method or composition for use of any of the preceding claims, wherein the subject (i) is at risk of developing, has, or is diagnosed with CRS; (ii) is identified or has previously been identified as being at risk for CRS; and/or (iii) has been, is being, or will be administered a CAR therapy, e.g., a CD123 CAR-expressing cell.

6. The method or composition for use of any of the preceding claims, wherein the JAK-STAT inhibitor is chosen from: ruxolitinib, AG490, AZD1480, tofacitinib (tasocitinib or CP-690550), CYT387, fedratinib, baricitinib (INCB039110), lestaurtinib (CEP701), pacritinib (SB1518), XL019, gandotinib (LY2784544), BMS911543, fedratinib (SAR302503), decemotinib (V-509), INCB39110, GEN1, GEN2, GLPG0634, NS018, and N-(cyanomethyl)-4-[2-(4-morpholinoanilino)pyrimidin-4-yl]benzamide, or a pharmaceutically acceptable salt thereof, e.g., wherein the JAK-STAT inhibitor is ruxolitinib or a pharmaceutically acceptable salt thereof.

7. The method or composition for use of any of claim 1-2 or 5-6, wherein the CAR therapy comprises a CD123 CAR-expressing cell.

8. The method or composition for use of any of the preceding claims, further comprising selecting the subject for administration of the JAK-STAT inhibitor (e.g., ruxolitinib).

9. The method or composition for use of any of the preceding claims, wherein the subject is selected based on
(i) his or her risk of developing CRS,
(ii) his or her diagnosis of CRS, and/or
(iii) whether he or she has been, is being, or will be administered a CAR therapy (e.g., CD123 CAR-expressing cell).

10. The method of or composition for use of any of the preceding claims, wherein the subject is selected for administration of the JAK-STAT inhibitor (e.g., ruxolitinib), if the subject is diagnosed with CRS, e.g., severe or non-severe CRS.

11. The method or composition for use of any of the preceding claims, wherein the subject is selected for administration of the JAK-STAT inhibitor (e.g., ruxolitinib), if the subject is at risk of developing CRS.

12. The method or composition for use of any of the preceding claims, wherein the subject is selected for administration of the JAK-STAT inhibitor (e.g., ruxolitinib), if the subject has been, is being, or will be administered a CAR therapy (e.g., CD123 CAR-expressing cell).

13. The method or composition for use of any of the preceding claims, wherein the JAK-STAT inhibitor is ruxolitinib and the CAR therapy is a CD123 CAR-expressing cell.

14. The method or composition for use of any of the preceding claims, wherein the CAR therapy (e.g., CD123 CAR-expressing cell) and the JAK-STAT inhibitor (e.g., ruxolitinib) are administered sequentially.

15. The method or composition for use of any of the preceding claims, wherein the JAK-STAT inhibitor (e.g., ruxolitinib) is administered prior to the CAR therapy (e.g., CD123 CAR-expressing cell).

16. The method or composition for use of any of claims 1-12, wherein the JAK-STAT inhibitor (e.g., ruxolitinib) and the CAR therapy (e.g., CD123 CAR-expressing cell) are administered simultaneously or concurrently.

17. The method or composition for use of any of the preceding claims, wherein the CAR therapy (e.g., CD123 CAR-expressing cell) and the JAK-STAT inhibitor (e.g., ruxolitinib) are administered for a treatment interval, and wherein the treatment interval comprises a single dose of the CAR therapy and multiple doses (e.g., a first and second, and optionally a subsequent dose) of the JAK-STAT inhibitor.

18. The method or composition for use of any of claim 1-15 or 17 wherein the dose of the CAR therapy is administered after (e.g., at least 1 day, 2 days, 3 days, 4 days, 5 days, 6 days, 7 days, 1 week, 2 weeks, 3 weeks, 4 weeks, 5 weeks, or more, after) administration of the first dose of the JAK-STAT inhibitor, e.g., but before administration of the second dose of the inhibitor.

19. The method or composition for use of any of claims 1-13 and 16-17, wherein the dose of the CAR therapy is administered concurrently with (e.g., within 2 days (e.g., within 2 days, 1 day, 24 hours, 12 hours, 6 hours, 4 hours, 2 hours, or less) of), the administration of the first dose of the JAK-STAT inhibitor.

20. The method or composition for use of any of claims 17-19, wherein one or more subsequent doses of the JAK-STAT inhibitor are administered after the second dose of the JAK-STAT inhibitor.

21. The method or composition for use of any of claims 17-20, wherein the doses of the JAK-STAT inhibitor are administered twice a day (BID).

22. The method or composition for use of any of preceding claims, wherein the treatment interval comprises a duration of at least 7 days, e.g., at least 7 days, 8 days, 9 days, 10 days, 1 week, 2 weeks, 3 weeks, 4 weeks, 5 weeks, 6 weeks, 1 month, 2 months, 3 months, 4 months, 5 months, 6 months, 7 months, 8 months, or more.

23. The method or composition for use of any of claims 17-22, wherein the treatment interval is repeated, e.g., one or more times, e.g., 1, 2, 3, 4, or 5 more times, e.g., the treatment interval is followed by one or more, e.g., 1, 2, 3, 4, or 5, subsequent treatment intervals.

24. The method or compositon for use of any of the preceding claims, wherein the CD123 binding domain comprises:
a heavy chain complementary determining region 1 (HC CDR1), a heavy chain complementary determining region 2 (HC CDR2), and a heavy chain complementary determining region 3 (HC CDR3) of any CD123 heavy chain binding domain amino acid sequence listed in Table 12B, Table 11A, or Table 12A; and
a light chain complementary determining region 1 (LC CDR1), a light chain complementary determining region 2 (LC CDR2), and a light chain complementary determining region 3 (LC CDR3) of any CD19 light chain binding domain amino acid sequence listed in Table 12B, Table 11A, or Table 12A.

25. The method or composition for use of any of the preceding claims, wherein the CD123 binding domain comprises a HC CDR1, a HC CDR2, and a HC CDR3 according to the HC CDR amino acid sequences in Tables 5A, 7A, 1A, or 3A, and a LC CDR1, a LC CDR2, and a LC CDR3 according to the LC CDR amino acid sequences in Tables 6A, 8A, 2A or 4A.

26. The method or composition for use of any of the preceding claims, wherein the CD123 binding domain comprises:
i) the amino acid sequence of any heavy chain variable region of a CD123 binding domain listed in Table 12B or 11A;
ii) an amino acid sequence having at least one, two or three modifications but not more than 30, 20 or 10 modifications to the amino acid sequence of any heavy chain variable region of a CD123 binding domain provided in Table 12B or 11A; or
iii) an amino acid sequence with at least 95% identity to the amino acid sequence of any heavy chain variable region of a CD123 binding domain provided in Table 12B or 11A.

27. The method or composition for use of any of the preceding claims, wherein the CD123 binding domain comprises:
(i) the amino acid sequence of any heavy chain of a CD123 binding domain provided in Table 12B, Table 11A, or Table 12A;
(ii) an amino acid sequence having at least one, two or three modifications but not more than 30, 20 or 10 modifications to any heavy chain of a CD123 binding domain provided in Table 12B, Table 11A, or Table 12A; or
(iii) an amino acid sequence with at least 95% identity to the amino acid sequence to any heavy chain of a CD123 binding domain provided in Table 12B, Table 11A, or Table 12A.

28. The method or composition for use of any of the preceding claims, wherein the CD123 binding domain comprises:
(i) the amino acid sequence of any light chain variable region of a CD123 binding domain provided in Table 12B, Table 11A, or Table 12A;
(ii) an amino acid sequence having at least one, two or three modifications but not more than 30, 20 or 10 modifications to the amino acid sequence of any light chain variable region of a CD123 binding domain provided in Table 12B, Table 11A, or Table 12A; or
(iii) an amino acid sequence with at least 95% identity to the amino acid sequence of any light chain variable region of a CD123 binding domain provided in Table 12B, Table 11A, or Table 12A.

29. The method or composition for use of any of the preceding claims, wherein the CD123 binding domain comprises:
(i) the amino acid sequence of any light chain of a CD123 binding domain provided in Table 12B, Table 11A, or Table 12A;
(ii) the amino acid sequence having at least one, two or three modifications but not more than 30, 20 or 10 modifications to any light chain of a CD123 binding domain provided in Table 12B, Table 11A, or Table 12A; or
(iii) an amino acid sequence with at least 95% identity to the amino acid sequence to any light chain of a CD123 binding domain provided in Table 12B, Table 11A, or Table 12A.

30. The method o or composition for use f any of the preceding claims, wherein the CD123 binding domain comprises the amino acid sequence of any heavy chain variable region listed in Table 12B or 11A, and the amino acid sequence of any light chain variable region listed in Table 12B or 11A.

31. The method or composition for use of any of the preceding claims, wherein the CD123 binding domain comprises:
(i) the amino acid sequence selected from a group consisting of SEQ ID NO:480, 483, 485, 478, 158, 159, 160, 157, 217, 218, 219, 216, 276, 277, 278, or 275;
(ii) an amino acid sequence having at least one, two or three modifications but not more than 30, 20 or 10 modifications to any of SEQ ID NO: 480, 483, 485, 478, 158, 159, 160, 157, 217, 218, 219, 216, 276, 277, 278, or 275; or
(iii) an amino acid sequence with at least 95% identity to any of SEQ ID NO: 480, 483, 485, 478, 158, 159, 160, 157, 217, 218, 219, 216, 276, 277, 278, or 275.

32. The method or composition for use of any of the preceding claims, wherein the transmembrane domain comprises a transmembrane domain from a protein selected from the group consisting of the alpha, beta or zeta chain of the T-cell receptor, CD28, CD3 epsilon, CD45, CD4, CD5, CD8, CD9, CD16, CD22, CD33, CD37, CD64, CD80, CD86, CD134, CD137 and CD154.

33. The method or composition for use of any of the preceding claims, wherein the transmembrane domain comprises
(i) the amino acid sequence of SEQ ID NO: 6,
(ii) an amino acid sequence comprises at least one, two or three modifications but not more than 20, 10 or 5 modifications of the amino acid sequence of SEQ ID NO:6, or
(iii) a sequence with at least 95% identity to the amino acid sequence of SEQ ID NO:6.

34. The method or composition for use of any of the preceding claims, wherein the CD123 binding domain is connected to the transmembrane domain by a hinge region.

35. The method or composition for use of any of the preceding claims, wherein the hinge region comprises SEQ ID NO:2, or a sequence with at least 95% identity thereof.

36. The method or composition for use of any of the preceding claims, wherein the intracellular signaling domain comprises a costimulatory signaling domain comprising a functional signaling domain obtained from a protein selected from the group consisting of a MHC class I molecule, a TNF receptor protein, an Immunoglobulin-like protein, a cytokine receptor, an integrin, a signaling lymphocytic activation molecule (SLAM protein), an activating NK cell receptor, BTLA, a Toll ligand receptor, OX40, CD2, CD7, CD27, CD28, CD30, CD40, CDS, ICAM-1, LFA-1 (CD11a/CD18), 4-1BB (CD137), B7-H3, CDS, ICAM-1, ICOS (CD278), GITR, BAFFR, LIGHT, HVEM (LIGHTR), KIRDS2, SLAMF7, NKp80 (KLRF1), NKp44, NKp30, NKp46, CD19, CD4, CD8alpha, CD8beta, IL2R beta, IL2R gamma, IL7R alpha, ITGA4, VLA1, CD49a, ITGA4, IA4, CD49D, ITGA6, VLA-6, CD49f, ITGAD, CD11d, ITGAE, CD103, ITGAL, CD11a, LFA-1, ITGAM, CD11b, ITGAX, CD11c, ITGB1, CD29, ITGB2, CD18, LFA-1, ITGB7, NKG2D, NKG2C, TNFR2, TRANCE/RANKL, DNAM1 (CD226), SLAMF4 (CD244, 2B4), CD84, CD96 (Tactile), CEACAM1, CRTAM, Ly9 (CD229), CD160 (BY55), PSGL1, CD100 (SEMA4D), CD69, SLAMF6 (NTB-A, Ly108), SLAM (SLAMF1, CD150, IPO-3), BLAME (SLAMF8), SELPLG (CD162), LTBR, LAT, GADS, SLP-76, PAG/Cbp, CD19a, and a ligand that specifically binds with CD83.

37. The method or composition for use of any of the preceding claims, wherein the costimulatory domain comprises the amino acid sequence of SEQ ID NO:7, or an amino acid sequence having at least one, two or three modifications but not more than 20, 10 or 5 modifications of the amino acid sequence of SEQ ID NO:7, or an amino acid sequence with at least 95% identity to the amino acid sequence of SEQ ID NO:7.

38. The method or composition for use of any of the preceding claims, wherein the intracellular signaling domain comprises a functional signaling domain of 4-1BB and/or a functional signaling domain of CD3 zeta.

39. The method or composition for use of any of the preceding claims, wherein the intracellular signaling domain comprises the amino acid sequence of SEQ ID NO: 7 and/or the amino acid sequence of SEQ ID NO:9 or SEQ ID NO:10; or an amino acid sequence having at least one, two or three modifications but not more than 20, 10 or 5 modifications of the amino acid sequence of SEQ ID NO:7 and/or the amino acid sequence of SEQ ID NO:9 or SEQ ID NO:10; or an amino acid sequence with at least 95% identity to the amino acid sequence of SEQ ID NO:7 and/or the amino acid sequence of SEQ ID NO:9 or SEQ ID NO:10.

40. The method or composition for use of any of the preceding claims, wherein the intracellular signaling domain comprises the amino acid sequence of SEQ ID NO:7 and the amino acid sequence of SEQ ID NO:9 or SEQ ID NO:10, wherein the amino acid sequences comprising the intracellular signaling domain are expressed in the same frame and as a single polypeptide chain.

41. The method or composition for use of any of the preceding claims, wherein the CAR further comprises a leader sequence comprising the amino acid sequence of SEQ ID NO:1.

42. The method or composition for use of any of the preceding claims, wherein the CAR comprises:
(i) the amino acid sequence of any of SEQ ID NOs: 99, 100, 101, or 98;
(ii) an amino acid sequence having at least one, two or three modifications but not more than 30, 20 or 10 modifications to any of SEQ ID NOs: 99, 100, 101, or 98; or
(iii) an amino acid sequence with at least 95% identity to any of SEQ ID NOs: 99, 100, 101, or 98.

43. The method or composition for use of any of the preceding claims, wherein the cell comprising a CAR comprises a nucleic acid encoding the CAR.

44. The method or composition of use of claim 43, wherein the nucleic acid encoding the CAR is a lentiviral vector.

45. The method or composition for use of claim 43 or 44, wherein the nucleic acid encoding the CAR is introduced into the cells by lentiviral transduction.

46. The method or composition for use of any of claims 43-45, wherein the nucleic acid encoding the CAR is an RNA, e.g., an in vitro transcribed RNA.

47. The method or composition for use of any of claims 43-46, wherein the nucleic acid encoding the CAR is introduced into the cells by electroporation.

48. The method or composition for use of any of the preceding claims, wherein the cell is a T cell or an NK cell.

49. The method or composition for use of claim 48, wherein the T cell is an autologous or allogeneic T cell.

50. The method or composition for use of any of the preceding claims, wherein the CRS is a severe CRS, e.g., grade 4 or 5 CRS.

51. The method or composition for use of any of claims 1-49, wherein the CRS is a less than severe CRS, e.g., grade 1, 2, or 3 CRS.

52. The method or composition for use of any of the preceding claims, wherein the subject is a mammal, e.g., a human.

53. The method or composition for use of any of the preceding claims, wherein the subject has or is diagnosed with, a disease associated with a B cell antigen, e.g., CD123, e.g., a hematological cancer, e.g., a lymphoma or a leukemia, e.g., acute myeloid leukemia (AML).

54. The method or composition for use of any of the preceding claims, wherein the dose of the CAR therapy (e.g., CD123 CAR therapy) comprises at least about 1×10⁵, 5×10⁶, 1×10⁷, 1.5×10⁷, 2×10⁷, 2.5×10⁷, 3×10⁷, 3.5×10⁷, 4×10⁷, 5×10⁷, 1×10⁸, 1.5×10⁸, 2×10⁸, 2.5×10⁸, 3×10⁸, 3.5×10⁸, 4×10⁸, 5×10⁸, 1×10⁹, 2×10⁹, or 5×10⁹ cells (e.g., CD123 CAR expressing cells).

55. The method or composition for use of any of the preceding claims, wherein the dose (e.g., each dose) of the JAK-STAT inhibitor (e.g., ruxolitinib) comprises 2.5 mg to 50 mg (e.g., 2.5-5 mg, 5-10 mg, 10-15 mg, 15-20 mg, 20-25 mg, 25-30 mg, 30-35 mg, 35-40 mg, 40-45 mg, or 45-50 mg) of the JAK-STAT inhibitor.

56. A composition comprising a BTK inhibitor (e.g., ibrutinib), alone or in combination with a CAR therapy (e.g., a CD19 CAR therapy, e.g., a CTL019 therapy), for use in preventing cytokine release syndrome (CRS) associated with the CAR therapy, in a subject in need thereof, wherein the subject is identified or has previously been identified as at risk for CRS, thereby preventing CRS in the subject.

57. A method of preventing cytokine release syndrome (CRS), e.g., CRS associated with a CAR therapy (e.g., a CD19 CAR therapy, e.g., a CTL019 therapy) in a subject in need thereof, comprising administering to the subject a BTK inhibitor (e.g., ibrutinib), alone or in combination with the CAR therapy,
wherein the subject is identified or has previously been identified as at risk for CRS, thereby preventing CRS in the subject.

58. The composition for use of claim 56 or the method of claim 57, wherein the subject has been, is being, or will be administered a CAR therapy, e.g., a CD19 CAR therapy, e.g., CTL019.

59. The composition for use of claim 56 or 58, or the method of claims 57-58, further comprising selecting the subject for administration of the BTK inhibitor, e.g., ibrutinib.

60. The composition for use or method of claim 59, wherein the subject is selected based on
(i) his or her risk of developing CRS,
(ii) his or her diagnosis of CRS, and/or
(iii) whether he or she has been, is being, or will be administered a CAR therapy (e.g., a CAR19 therapy, e.g., a CTL019 therapy).

61. The composition for use or method of claim 59 or 60, wherein:
(i) the subject is selected for administration of the BTK inhibitor (e.g., ibrutinib) if the subject is diagnosed with CRS, e.g., severe or non-severe CRS;
(ii) the subject is selected for administration of the BTK inhibitor (e.g., ibrutinib) if the subject is at risk of (e.g., identified as at risk of) developing CRS; or
(iii) the subject is selected for administration of the BTK inhibitor (e.g., ibrutinib) if the subject has been, is being, or will be administered a CAR therapy (e.g., a CAR19 therapy, e.g., a CTL019 therapy).

62. The composition for use or method of any of claims 57-61, wherein the BTK inhibitor is chosen from ibrutinib, GDC-0834, RN-486, CGI-560, CGI-1764, HM-71224, CC-292, ONO-4059, CNX-774, or LFM-A13, or a pharmaceutically acceptable salt thereof, e.g., wherein the BTK inhibitor is ibrutinib or a pharmaceutically acceptable salt thereof.

63. The composition for use or method of any of claims 57-62, wherein CAR therapy is a CAR19 therapy, e.g., a CTL019 therapy.

64. The composition for use or method of any of claims 57-63, wherein the CAR therapy (e.g., CAR19 therapy) and the BTK inhibitor (e.g., ibrutinib) are administered for a treatment interval, and wherein the treatment interval comprises a single dose of the CAR therapy and multiple doses (e.g., a first and second, and optionally a subsequent dose) of the BTK inhibitor.

65. The composition for use or method of any of claims 57-64, wherein the dose of the CAR therapy is administered after (e.g., at least 1 day, 2 days, 3 days, 4 days, 5 days, 6 days, 7 days, 1 week, 2 weeks, 3 weeks, 4 weeks, 5 weeks, or more, after) administration of the first dose of the BTK inhibitor, e.g., but before administration of the second dose of the inhibitor.

66. The composition for use or method of any of claims 57-64, wherein the dose of the CAR therapy is administered concurrently with (e.g., within 2 days (e.g., within 2 days, 1 day, 24 hours, 12 hours, 6 hours, 4 hours, 2 hours, or less) of), the administration of the first dose of the BTK inhibitor.

67. The composition for use or method of any of claims 62-66, wherein one or more subsequent doses of the BTK inhibitor are administered after the second dose of the BTK inhibitor.

68. The composition for use or method of any of claims 57-67, wherein the doses of the BTK inhibitor are administered once a day (QD).

69. The composition for use or method of claim 64-68, wherein the treatment interval comprises a duration of at least 7 days, e.g., at least 7 days, 8 days, 9 days, 10 days, 1 week, 2 weeks, 3 weeks, 4 weeks, 5 weeks, 6 weeks, 1 month, 2 months, 3 months, 4 months, 5 months, 6 months, 7 months, 8 months, or more.

70. The composition for use or method of any of claims 64-69, wherein the treatment interval is repeated, e.g., one or more times, e.g., 1, 2, 3, 4, or 5 more times.

71. The composition for use or method of any of claims 64-70, wherein the treatment interval is followed by one or more, e.g., 1, 2, 3, 4, or 5, subsequent treatment intervals.

72. The composition for use or method of any of claims 64-71, wherein the dose of the CAR therapy (e.g., the CAR19 therapy) comprises at least about 1×10⁵, 5×10⁶, 1×10⁷, 1.5×10⁷, 2×10⁷, 2.5×10⁷, 3×10⁷, 3.5×10⁷, 4×10⁷, 5×10⁷, 1×10⁸, 1.5×10⁸, 2×10⁸, 2.5×10⁸, 3×10⁸, 3.5×10⁸, 4×10⁸, 5×10⁸, 1×10⁹, 2×10⁹, or 5×10⁹ cells (e.g., CD19 CAR-expressing cells).

73. The composition for use or method of any of claims 64-72, wherein the dose (e.g., each dose) of the BTK inhibitor, e.g., ibrutinib (PCI-32765), comprises about 250 mg, 300 mg, 350 mg, 400 mg, 420 mg, 440 mg, 460 mg, 480 mg, 500 mg, 520 mg, 540 mg, 560 mg, 580 mg, 600 mg (e.g., 250 mg, 420 mg or 560 mg) of ibrutinib.

74. The composition for use or method of any of claims 57-73, wherein the CD19 binding domain comprises a heavy chain complementary determining region 1 (HC CDR1), a heavy chain complementary determining region 2 (HC CDR2), and a heavy chain complementary determining region 3 (HC CDR3) of any CD19 heavy chain binding domain amino acid sequence listed in Table 13A or 14A; and a light chain complementary determining region 1 (LC CDR1), a light chain complementary determining region 2 (LC CDR2), and a light chain complementary determining region 3 (LC CDR3) of any CD19 light chain binding domain amino acid sequence listed in Table 13A or 14A.

75. The composition for use or method of any of claims 57-73, wherein the CD19 binding domain comprises a HC CDR1, a HC CDR2, and a HC CDR3 according to the HC CDR amino acid sequences in Table 15A, and a LC CDR1, a LC CDR2, and a LC CDR3 according to the LC CDR amino acid sequences in Table 16A.

76. The composition for use or method of any of claims 57-75, wherein the CD19 binding domain comprises:
(i) the amino acid sequence of any heavy chain variable region of a CD19 binding domain listed in Table 13A or 14A;
(ii) an amino acid sequence having at least one, two or three modifications but not more than 30, 20 or 10 modifications to the amino acid sequence of any heavy chain variable region of a CD19 binding domain provided in Table 13A or 14A; or
(iii) an amino acid sequence with at least 95% identity to the amino acid sequence of any heavy chain variable region of a CD19 binding domain provided in Table 13A or 14A.

77. The composition for use or method of any of claims 57-76, wherein the CD19 binding domain comprises:
(i) the amino acid sequence of any heavy chain of a CD19 binding domain provided in Table 13A or 14A;
(ii) an amino acid sequence having at least one, two or three modifications but not more than 30, 20 or 10 modifications to any heavy chain of a CD19 binding domain provided in Table 13A or 14A; or
(iii) an amino acid sequence with at least 95% identity to the amino acid sequence to any heavy chain of a CD19 binding domain provided in Table 13A or 14A.

78. The composition for use or method of any of claims 57-77, wherein the CD19 binding domain comprises:
(i) the amino acid sequence of any light chain variable region of a CD19 binding domain provided in Table 13A or 14A;
(ii) an amino acid sequence having at least one, two or three modifications but not more than 30, 20 or 10 modifications to the amino acid sequence of any light chain variable region of a CD19 binding domain provided in Table 13A or 14A; or
(iii) an amino acid sequence with at least 95% identity to the amino acid sequence of any light chain variable region of a CD19 binding domain provided in Table 13A or 14A.

79. The composition for use or method of any of claims 57-78, wherein the CD19 binding domain comprises:
(i) the amino acid sequence of any light chain of a CD19 binding domain provided in Table 13A or 14A;
(ii) the amino acid sequence having at least one, two or three modifications but not more than 30, 20 or 10 modifications to any light chain of a CD19 binding domain provided in Table 13A or 14A; or
(iii) an amino acid sequence with at least 95% identity to the amino acid sequence to any light chain of a CD19 binding domain provided in Table 13A or 14A.

80. The composition for use or method of any of claims 57-79, wherein the CD19 binding domain comprises the amino acid sequence of any heavy chain variable region listed in Table 13A or 14A, and the amino acid sequence of any light chain variable region listed in Table 13A or 14A.

81. The composition for use or method of any of claims 57-80, wherein the CD19 binding domain comprises:
(i) the amino acid sequence selected from the group consisting of SEQ ID NO: 774, SEQ ID NO: 710, SEQ ID NO: 711, SEQ ID NO: 712, SEQ ID NO:713, SEQ ID NO:714, SEQ ID NO: 715, SEQ ID NO: 716, SEQ ID NO: 717, SEQ ID NO: 718, SEQ ID NO: 719, SEQ ID NO: 720, SEQ ID NO: 721, SEQ ID NO: 775, SEQ ID NO: 777, or SEQ ID NO: 780;
(i) an amino acid sequence having at least one, two or three modifications but not more than 30, 20 or 10 modifications to any of SEQ ID NO: 774, SEQ ID NO: 710, SEQ ID NO: 711, SEQ ID NO: 712, SEQ ID NO:713, SEQ ID NO:714, SEQ ID NO: 715, SEQ ID NO: 716, SEQ ID NO: 717, SEQ ID NO: 718, SEQ ID NO: 719, SEQ ID NO: 720, SEQ ID NO: 721, SEQ ID NO: 775, SEQ ID NO: 777, or SEQ ID NO: 780; or
(iii) an amino acid sequence with at least 95% identity to the amino acid sequence to any of SEQ ID NO: 774, SEQ ID NO: 710, SEQ ID NO: 711, SEQ ID NO: 712, SEQ ID NO:713, SEQ ID NO:714, SEQ ID NO: 715, SEQ ID NO: 716, SEQ ID NO: 717, SEQ ID NO: 718, SEQ ID NO: 719, SEQ ID NO: 720, SEQ ID NO: 721, SEQ ID NO: 775, SEQ ID NO: 777, or SEQ ID NO: 780.

82. The composition for use or method of any of claims 57-81, wherein the transmembrane domain comprises a transmembrane domain from a protein selected from the group consisting of the alpha, beta or zeta chain of the T-cell receptor, CD28, CD3 epsilon, CD45, CD4, CD5, CD8, CD9, CD16, CD22, CD33, CD37, CD64, CD80, CD86, CD134, CD137 and CD154.

83. The composition for use or method of any of claims 57-82, wherein the transmembrane domain comprises
(i) the amino acid sequence of SEQ ID NO: 6,
(ii) an amino acid sequence comprises at least one, two or three modifications but not more than 20, 10 or 5 modifications of the amino acid sequence of SEQ ID NO:6, or
(iii) a sequence with at least 95% identity to the amino acid sequence of SEQ ID NO:6.

84. The composition for use or method of any of claims 57-83, wherein the CD19 binding domain is connected to the transmembrane domain by a hinge region.

85. The composition for use or method of any of claims 57-84, wherein the hinge region comprises SEQ ID NO:2, or a sequence with at least 95% identity thereof.

86. The composition for use or method of any of claims 57-85, wherein the intracellular signaling domain comprises a costimulatory signaling domain comprising a functional signaling domain obtained from a protein selected from the group consisting of a MHC class I molecule, a TNF receptor protein, an Immunoglobulin-like protein, a cytokine receptor, an integrin, a signaling lymphocytic activation molecule (SLAM protein), an activating NK cell receptor, BTLA, a Toll ligand receptor, OX40, CD2, CD7, CD27, CD28, CD30, CD40, CDS, ICAM-1, LFA-1 (CD11a/CD18), 4-1BB (CD137), B7-H3, CDS, ICAM-1, ICOS (CD278), GITR, BAFFR, LIGHT, HVEM (LIGHTR), KIRDS2, SLAMF7, NKp80 (KLRF1), NKp44, NKp30, NKp46, CD19, CD4, CD8alpha, CD8beta, IL2R beta, IL2R gamma, IL7R alpha, ITGA4, VLA1, CD49a, ITGA4, IA4, CD49D, ITGA6, VLA-6, CD49f, ITGAD, CD11d, ITGAE, CD103, ITGAL, CD11a, LFA-1, ITGAM, CD11b, ITGAX, CD11c, ITGB1, CD29, ITGB2, CD18, LFA-1, ITGB7, NKG2D, NKG2C, TNFR2, TRANCE/RANKL, DNAM1 (CD226), SLAMF4 (CD244, 2B4), CD84, CD96 (Tactile), CEACAM1, CRTAM, Ly9 (CD229), CD160 (BY55), PSGL1, CD100 (SEMA4D), CD69, SLAMF6 (NTB-A, Ly108), SLAM (SLAMF1, CD150, IPO-3), BLAME (SLAMF8), SELPLG (CD162), LTBR, LAT, GADS, SLP-76, PAG/Cbp, CD19a, and a ligand that specifically binds with CD83.

87. The composition for use or method of claim 86, wherein the costimulatory domain comprises the amino acid sequence of SEQ ID NO:7, or an amino acid sequence having at least one, two or three modifications but not more than 20, 10 or 5 modifications of the amino acid sequence of SEQ ID NO:7, or an amino acid sequence with at least 95% identity to the amino acid sequence of SEQ ID NO:7.

88. The composition for use or method of claim 86, wherein the intracellular signaling domain comprises a functional signaling domain of 4-1BB and/or a functional signaling domain of CD3 zeta.

89. The composition for use or method of any of claims 86-88, wherein the intracellular signaling domain comprises the amino acid sequence of SEQ ID NO: 7 and/or the amino acid sequence of SEQ ID NO:9 or SEQ ID NO:10; or an amino acid sequence having at least one, two or three modifications but not more than 20, 10 or 5 modifications of the amino acid sequence of SEQ ID NO:7 and/or the amino acid sequence of SEQ ID NO:9 or SEQ ID NO:10; or an amino acid sequence with at least 95% identity to the amino acid sequence of SEQ ID NO:7 and/or the amino acid sequence of SEQ ID NO:9 or SEQ ID NO:10.

90. The composition for use or method of any of claims 86-89, wherein the intracellular signaling domain comprises the amino acid sequence of SEQ ID NO:7 and the amino acid sequence of SEQ ID NO:9 or SEQ ID NO:10, wherein the amino acid sequences comprising the intracellular signaling domain are expressed in the same frame and as a single polypeptide chain.

91. The composition for use or method of any of claims 57-90, wherein the CAR further comprises a leader sequence comprising the amino acid sequence of SEQ ID NO:1.

92. The composition for use or method of any of claims 57-91, wherein the CAR comprises:
(i) the amino acid sequence of any of SEQ ID NO: 773; SEQ ID NO: 758; SEQ ID NO: 759, SEQ ID NO: 760, SEQ ID NO: 761, SEQ ID NO: 762, SEQ ID NO: 763, SEQ ID NO: 764, SEQ ID NO: 765, SEQ ID NO: 766, SEQ ID NO: 767, SEQ ID NO: 768, SEQ ID NO: 769, SEQ ID NO: 776, SEQ ID NO: 779, or SEQ ID NO: 781;
(ii) an amino acid sequence having at least one, two or three modifications but not more than 30, 20 or 10 modifications to any of SEQ ID NO: 773; SEQ ID NO: 758; SEQ ID NO: 759, SEQ ID NO: 760, SEQ ID NO: 761, SEQ ID NO: 762, SEQ ID NO: 763, SEQ ID NO: 764, SEQ ID NO: 765, SEQ ID NO: 766, SEQ ID NO: 767, SEQ ID NO: 768, SEQ ID NO: 769, SEQ ID NO: 776, SEQ ID NO: 779, or SEQ ID NO: 781; or
(iii) an amino acid sequence with at least 95% identity to any of SEQ ID NO: 773; SEQ ID NO: 758; SEQ ID NO: 759, SEQ ID NO: 760, SEQ ID NO: 761, SEQ ID NO: 762, SEQ ID NO: 763, SEQ ID NO: 764, SEQ ID NO: 765, SEQ ID NO: 766, SEQ ID NO: 767, SEQ ID NO: 768, SEQ ID NO: 769, SEQ ID NO: 776, SEQ ID NO: 779, or SEQ ID NO: 781.

93. The composition for use or method of any of claims 57-92, wherein the cell comprising a CAR comprises a nucleic acid encoding the CAR.

94. The composition for use or method of claim 93, wherein the nucleic acid encoding the CAR is a lentiviral vector.

95. The composition for use or method of claim 93 or 94, wherein the nucleic acid encoding the CAR is introduced into the cells by lentiviral transduction.

96. The composition for use or method of any of claims 93-95, wherein the nucleic acid encoding the CAR is an RNA, e.g., an in vitro transcribed RNA.

97. The composition for use or method of any of claims 93-96, wherein the nucleic acid encoding the CAR is introduced into the cells by electroporation.

98. The composition for use or method of claims 57-97, wherein the cell is a T cell or an NK cell.

99. The composition for use or method of claim 98, wherein the T cell is an autologous or allogeneic T cell.

100. The composition for use or method of any of claims 57-99, wherein the CD19 binding domain is the amino acid sequence of SEQ ID NO: 774; or wherein the CAR comprises the amino acid sequence of SEQ ID NO: 773.

101. The composition for use or method of any of claims 57-100, wherein the CRS is a severe CRS, e.g., grade 4 or 5 CRS.

102. The composition for use or method of any of claims 57-100, wherein the CRS is a less than severe CRS, e.g., grade 1, 2, or 3 CRS.

103. The composition for use or method of any of claims 57-102, wherein the subject has a disease associated with expression of a B cell antigen, e.g., CD19, e.g., a cancer, e.g., a hematological cancer, e.g., a lymphoma or a leukemia, e.g., acute lymphoid leukemia (ALL).

104. The composition for use or method of any of claims 57-103, wherein the subject is a mammal, e.g., a human.

105. The composition for use or method of any of the preceding claims, further comprising administering an IL-6 inhibitor (e.g., an anti-IL6 receptor inhibitor, e.g., an anti-IL6 receptor inhibitor, e.g., tocilizumab), to the subject.

106. The composition for use or method of claim 105, wherein the IL-6 inhibitor is administered prior to, concurrently with, or subsequent to, a dose (e.g., a first dose) of the CAR therapy.

107. The composition for use or method of any of claims 105-106, wherein the IL-6 inhibitor is administered prior to or within 2 weeks (e.g., 2 weeks, 1.5 weeks, 1 week, 14 days, 13 days, 12 days, 11 days, 10 days, 9 days, 8 days, 7 days, 6 days, 5 days, 4 days, 3 days, 2 days, 1 day, 24 hours, 20 hours, 15 hours, 10 hours, 5 hours, 2 hours, 1 hour or less) of a first sign of a symptom of CRS (e.g., a fever, e.g., characterized by a temperature of at least 38° C. (e.g., at least 38.5° C.), e.g., for two successive measurements in 24 hours (e.g., at least 4, 5, 6, 7, 8 hours, or more, apart)) in the subject.

108. The composition for use or method of claim 107, wherein the IL-6 inhibitor is administered after administration of a dose (e.g., a first dose) of the CAR therapy.

109. The composition for use or method of claim 108, wherein the IL-6 inhibitor is administered 1 hour to 10 days (e.g., 1-24 hours, 1-2 hours, 2-4 hours, 4-8 hours, 8-12 hours, 12-24 hours, 1-2 days, 2-3 days, 3-4 days, 4-5 days, 5-7 days, or 7-10 days) after administration of the dose of the CAR therapy.

110. The composition for use or method of any of claims 105-109, comprising administering a dose of tocilizumab of about 5-15 mg/kg, e.g., 8-12 mg/kg (e.g., about 8 mg/kg, about 9 mg/kg, about 10 mg/kg, about 11 mg/kg, or about 12 mg/kg).

111. The composition for use or method of any of claims 105-110, wherein the subject has (e.g., is diagnosed with or identified as having) a high tumor burden prior to treatment with the CAR-therapy, e.g., wherein the high tumor burden is characterized by at least 40% blasts (e.g., at least 40%, 45%, 50%, 60%, 70%, 80%, 90%, 95%, or more, blasts) in a bone marrow of the subject prior to administration of the CAR therapy (e.g., about 1-5 days prior to administration of the CAR therapy).

112. The composition for use or method of any of claims 105-111, wherein the CAR therapy comprises a CD19 CAR-expressing cell, e.g., a CTL-019-expressing cell.

113. An IL-6 inhibitor (e.g., an anti-IL6 receptor inhibitor, e.g., tocilizumab), for use in treating or preventing cytokine release syndrome (CRS) associated with use of a chimeric antigen receptor (CAR) therapy (e.g., a population of cells expressing a CAR in a subject), wherein the IL-6 inhibitor is used prior to, simultaneously with, or within 1 day (e.g., within 24 hours, 12 hours, 6 hours, 5, hours, 4 hours, 3 hours, 2 hours, 1 hour or less) of, use of a dose (e.g., a first dose) of said CAR therapy.

114. A method of treating or preventing cytokine release syndrome (CRS) associated with administration of a chimeric antigen receptor (CAR) therapy (e.g., a population of cells, expressing a CAR) in a subject, comprising administering to the subject an IL-6 inhibitor (e.g., an anti-IL6 receptor inhibitor, e.g., tocilizumab) prior to, simultaneously with, or within 1 day (e.g., within 24 hours, 12 hours, 6 hours, 5, hours, 4 hours, 3 hours, 2 hours, 1 hour or less) of, administration of a dose (e.g., a first dose) of said CAR therapy.

115. The composition for use of claim 113 or the method of claim 114, wherein the IL-6 inhibitor (e.g., tocilizumab) is administered upon (e.g., within 1 hour, 30 minutes, 20 minutes, 15 minutes or less) a first sign of a symptom of CRS (e.g., a fever, e.g., characterized by a temperature of at least 38° C., e.g., for two successive measurements in 24 hours (e.g., at least 4, 5, 6, 7, 8 hours, or more, apart)) in the subject.

116. The composition for use or method, of any of claims 113-115, wherein the CAR comprises an antigen binding domain that binds one or more of the following: CD19; CD123; CD22; CD30; CD171; CS-1 (also referred to as CD2 subset 1, CRACC, SLAMF7, CD319, and 19A24); C-type lectin-like molecule-1 (CLL-1 or CLECL1); CD33; epidermal growth factor receptor variant III (EGFRvIII); ganglioside G2 (GD2); ganglioside GD3 (aNeu5Ac(2-8)aNeu5Ac(2-3)bDGalp(1-4)bDGlcp(1-1)Cer); TNF receptor family member B cell maturation (BCMA); Tn antigen ((Tn Ag) or (GalNAcα-Ser/Thr)); prostate-specific membrane antigen (PSMA); Receptor tyrosine kinase-like orphan receptor 1 (ROR1); Fms-Like Tyrosine Kinase 3 (FLT3); Tumor-associated glycoprotein 72 (TAG72); CD38; CD44v6; Carcinoembryonic antigen (CEA); Epithelial cell adhesion molecule (EPCAM); B7H3 (CD276); KIT (CD117); Interleukin-13 receptor subunit alpha-2 (IL-13Ra2 or CD213A2); Mesothelin; Interleukin 11 receptor alpha (IL-11Ra); prostate stem cell antigen (PSCA); Protease Serine 21 (Testisin or PRSS21); vascular endothelial growth factor receptor 2 (VEGFR2); Lewis(Y) antigen; CD24; Platelet-derived growth factor receptor beta (PDGFR-beta); Stage-specific embryonic antigen-4 (SSEA-4); CD20; Folate receptor alpha; Receptor tyrosine-protein kinase ERBB2 (Her2/neu); Mucin 1, cell surface associated (MUC1); epidermal growth factor receptor (EGFR); neural cell adhesion molecule (NCAM); Prostase; prostatic acid phosphatase (PAP); elongation factor 2 mutated (ELF2M); Ephrin B2; fibroblast activation protein alpha (FAP); insulin-like growth factor 1 receptor (IGF-I receptor), carbonic anhydrase IX (CAIX); Proteasome (Prosome, Macropain) Subunit, Beta Type, 9 (LMP2); glycoprotein 100 (gp100); oncogene fusion protein consisting of breakpoint cluster region (BCR) and Abelson murine leukemia viral oncogene homolog 1 (Abl) (bcr-abl); tyrosinase; ephrin type-A receptor 2 (EphA2); Fucosyl GM1; sialyl Lewis adhesion molecule (sLe); ganglioside GM3 (aNeu5Ac(2-3)bDGalp(1-4)bDGlcp(1-1)Cer); transglutaminase 5 (TGS5); high molecular weight-melanoma-associated antigen (HMWMAA); o-acetyl-GD2 ganglioside (OAcGD2); Folate receptor beta; tumor endothelial marker 1 (TEM1/CD248); tumor endothelial marker 7-related (TEM7R); claudin 6 (CLDN6); thyroid stimulating hormone receptor (TSHR); G protein-coupled receptor class C group 5, member D (GPRCSD); chromosome X open reading frame 61 (CXORF61); CD97; CD179a; anaplastic lymphoma kinase (ALK); Polysialic acid; placenta-specific 1 (PLAC1); hexasaccharide portion of globoH glycoceramide (GloboH); mammary gland differentiation antigen (NY-BR-1); uroplakin 2 (UPK2); Hepatitis A virus cellular receptor 1 (HAVCR1); adrenoceptor beta 3 (ADRB3); pannexin 3 (PANX3); G protein-coupled receptor 20 (GPR20); lymphocyte antigen 6 complex, locus K 9 (LY6K); Olfactory receptor 51E2 (OR51E2); TCR Gamma Alternate Reading Frame Protein (TARP); Wilms tumor protein (WT1); Cancer/testis antigen 1 (NY-ESO-1); Cancer/testis antigen 2 (LAGE-1a); Melanoma-associated antigen 1 (MAGE-A1); ETS translocation-variant gene 6, located on chromosome 12p (ETV6-AML); sperm protein 17 (SPA17); X Antigen Family, Member 1A (XAGE1); angiopoietin-binding cell surface receptor 2 (Tie 2); melanoma cancer testis antigen-1 (MAD-CT-1); melanoma cancer testis antigen-2 (MAD-CT-2); Fos-related antigen 1; tumor protein p53 (p53); p53 mutant; prostein; surviving; telomerase; prostate carcinoma tumor antigen-1 (PCTA-1 or Galectin 8), melanoma antigen recognized by T cells 1 (MelanA or MART1); Rat sarcoma (Ras) mutant; human Telomerase reverse transcriptase (hTERT); sarcoma translocation breakpoints; melanoma inhibitor of apoptosis (ML-IAP); ERG (transmembrane protease, serine 2 (TMPRSS2) ETS fusion gene); N-Acetyl glucosaminyl-transferase V (NA17); paired box protein Pax-3 (PAX3); Androgen receptor; Cyclin B1; v-myc avian myelocytomatosis viral oncogene neuroblastoma derived homolog (MYCN); Ras Homolog Family Member C (RhoC); Tyrosinase-related protein 2 (TRP-2); Cytochrome P450 1B1 (CYP1B1); CCCTC-Binding Factor (Zinc Finger Protein)-Like (BORIS or Brother of the Regulator of Imprinted Sites), Squamous Cell Carcinoma Antigen Recognized By T Cells 3 (SART3); Paired box protein Pax-5 (PAX5); proacrosin binding protein sp32 (OY-TES1); lymphocyte-specific protein tyrosine kinase (LCK); A kinase anchor protein 4 (AKAP-4); synovial sarcoma, X breakpoint 2 (SSX2); Receptor for Advanced Glycation Endproducts (RAGE-1); renal ubiquitous 1 (RU1); renal ubiquitous 2 (RU2); legumain; human papilloma virus E6 (HPV E6); human papilloma virus E7 (HPV E7); intestinal carboxyl esterase; heat shock protein 70-2 mutated (mut hsp70-2); CD79a; CD79b; CD72; Leukocyte-associated immunoglobulin-like receptor 1 (LAIR1); Fc fragment of IgA receptor (FCAR or CD89); Leukocyte immunoglobulin-like receptor subfamily A member 2 (LILRA2); CD300 molecule-like family member f (CD300LF); C-type lectin domain family 12 member A (CLEC12A); bone marrow stromal cell antigen 2 (BST2); EGF-like module-containing mucin-like hormone receptor-like 2 (EMR2); lymphocyte antigen 75 (LY75); Glypican-3 (GPC3); Fc receptor-like 5 (FCRL5); or immunoglobulin lambda-like polypeptide 1 (IGLL1).

117. The composition for use or method of any of claims 113-115, wherein the antigen recognition domain binds CD19.

118. The composition for use or method of claim 116, wherein the CAR comprises the amino acid sequence of SEQ ID NO: 773.

119. The composition for use or method of any of the preceding claims, wherein the CAR-expressing cell is administered at a dose (e.g., total dose) of 1.5×10⁷ to 5×10⁹ cells per kg (e.g., 0.3×10⁶ to 1×10⁸ cells per kg), e.g., wherein the total dose is administered over multiple doses (e.g., a first dose, a second dose, and optionally a third dose).

120. The composition for use or method of claim 119, wherein the first dose comprises 10% of the total dose (e.g., about 1×10⁷ cells/kg), e.g., administered on a first day.

121. The composition for use or method of claim 120, wherein the second dose comprises 30% of the total dose (e.g., about 3×10⁷ cells/kg), e.g., administered on a subsequent day (e.g., 1, 2, 3, 4, 5, 6, or 7 days after the first dose).

122. The composition for use or method of any of claims 113-121, wherein the IL-6 inhibitor (e.g., tocilizumab) is administered at a dose of about 5-15 mg/kg, e.g., 8-12 mg/kg (e.g., about 8 mg/kg, about 9 mg/kg, about 10 mg/kg, about 11 mg/kg, or about 12 mg/kg).

123. A pharmaceutical composition comprising (i) a population of immune effector cells, expressing a chimeric antigen receptor (CAR), wherein the CAR comprises a CD123 binding domain, a transmembrane domain, and an intracellular signaling domain; and (ii) a JAK-STAT inhibitor, e.g., ruxolitinib.

124. The pharmaceutical composition of claim 123, wherein the composition further comprises an IL-6 inhibitor (e.g., an anti-IL6 receptor inhibitor, e.g., tocilizumab).

125. A pharmaceutical composition comprising (i) a CD123 chimeric antigen receptor (CAR) therapy (e.g., a population of immune effector cells expressing a CAR, wherein the CAR comprises a CD123 binding domain, a transmembrane domain, and an intracellular signaling domain); and (ii) a JAK-STAT inhibitor, e.g., ruxolitinib, for use in treating a cancer or for use in preventing cytokine release syndrome (CRS).

126. The pharmaceutical composition of claim 125, wherein the composition for use further comprises an IL-6 inhibitor (e.g., an anti-IL6 receptor inhibitor, e.g., tocilizumab).

127. A pharmaceutical composition comprising (i) a BTK inhibitor (e.g., ibrutinib); and (ii) a chimeric antigen receptor (CAR) therapy (e.g., a CD19 CAR-therapy, e.g., a CTL019 therapy); for use in preventing cytokine release syndrome (CRS), e.g., in a subject that is identified or has previously been identified as at risk for CRS.

128. The pharmaceutical composition of claim 127, wherein the composition further comprises an IL-6 inhibitor (e.g., an anti-IL6 receptor inhibitor, e.g., tocilizumab).

The application's sequence listing, which the Patent Office published only in electronic form, follows.

SEQUENCE LISTING (799 sequences)

SEQ ID NO: 1 - protein, 21 aa, Artificial Sequence
  source: /note="Description of Artificial Sequence: Synthetic peptide"
MALPVTALLLPLALLLHAARP

SEQ ID NO: 2 - protein, 45 aa, Artificial Sequence
  source: /note="Description of Artificial Sequence: Synthetic polypeptide"
TTTPAPRPPTPAPTIASQPLSLRPEACRPAAGGAVHTRGLDFACD

SEQ ID NO: 3 - protein, 230 aa, Artificial Sequence
  source: /note="Description of Artificial Sequence: Synthetic polypeptide"
ESKYGPPCPPCPAPEFLGGPSVFLFPPKPKDTLMISRTPEVTCVVVDVSQEDPEVQFNWYVDGVEVHNAKTKPREEQFNSTYRVVSVLTVLHQDWLNGKEYKCKVSNKGLPSSIEKTISKAKGQPREPQVYTLPPSQEEMTKNQVSLTCLVKGFYPSDIAVEWESNGQPENNYKTTPPVLDSDGSFFLYSRLTVDKSRWQEGNVFSCSVMHEALHNHYTQKSLSLSLGKM

SEQ ID NO: 4 - protein, 282 aa, Artificial Sequence
  source: /note="Description of Artificial Sequence: Synthetic polypeptide"
RWPESPKAQASSVPTAQPQAEGSLAKATTAPATTRNTGRGGEEKKKEKEKEEQEERETKTPECPSHTQPLGVYLLTPAVQDLWLRDKATFTCFVVGSDLKDAHLTWEVAGKVPTGGVEEGLLERHSNGSQSQHSRLTLPRSLWNAGTSVTCTLNHPSLPPQRLMALREPAAQAPVKLSLNLLASSDPPEAASWLLCEVSGFSPPNILLMWLEDQREVNTSGFAPARPPPQPGSTTFWAWSVLRVPAPPSPQPATYTCVVSHEDSRTLLNASRSLEVSYVTDH

SEQ ID NO: 5 - protein, 10 aa, Artificial Sequence
  source: /note="Description of Artificial Sequence: Synthetic peptide"
GGGGSGGGGS

SEQ ID NO: 6 - protein, 24 aa, Artificial Sequence
  source: /note="Description of Artificial Sequence: Synthetic peptide"
IYIWAPLAGTCGVLLLSLVITLYC

SEQ ID NO: 7 - protein, 42 aa, Artificial Sequence
  source: /note="Description of Artificial Sequence: Synthetic polypeptide"
KRGRKKLLYIFKQPFMRPVQTTQEEDGCSCRFPEEEEGGCEL

SEQ ID NO: 8 - protein, 48 aa, Artificial Sequence
  source: /note="Description of Artificial Sequence: Synthetic polypeptide"
QRRKYRSNKGESPVEPAEPCRYSCPREEEGSTIPIQEDYRKPEPACSP

SEQ ID NO: 9 - protein, 112 aa, Artificial Sequence
  source: /note="Description of Artificial Sequence: Synthetic polypeptide"
RVKFSRSADAPAYKQGQNQLYNELNLGRREEYDVLDKRRGRDPEMGGKPRRKNPQEGLYNELQKDKMAEAYSEIGMKGERRRGKGHDGLYQGLSTATKDTYDALHMQALPPR

SEQ ID NO: 10 - protein, 112 aa, Artificial Sequence
  source: /note="Description of Artificial Sequence: Synthetic polypeptide"
RVKFSRSADAPAYQQGQNQLYNELNLGRREEYDVLDKRRGRDPEMGGKPRRKNPQEGLYNELQKDKMAEAYSEIGMKGERRRGKGHDGLYQGLSTATKDTYDALHMQALPPR

SEQ ID NO: 11 - DNA, 1184 bp, Artificial Sequence
  source: /note="Description of Artificial Sequence: Synthetic polynucleotide"
cgtgaggctccggtgcccgtcagtgggcagagcgcacatcgcccacagtccccgagaagttggggggaggggtcggcaattgaaccggtgcctagagaaggtggcgcggggtaaactgggaaagtgatgtcgtgtactggctccgcctttttcccgagggtgggggagaaccgtatataagtgcagtagtcgccgtgaacgttctttttcgcaacgggtttgccgccagaacacaggtaagtgccgtgtgtggttcccgcgggcctggcctctttacgggttatggcccttgcgtgccttgaattacttccacctggctgcagtacgtgattcttgatcccgagcttcgggttggaagtgggtgggagagttcgaggccttgcgcttaaggagccccttcgcctcgtgcttgagttgaggcctggcctgggcgctggggccgccgcgtgcgaatctggtggcaccttcgcgcctgtctcgctgctttcgataagtctctagccatttaaaatttttgatgacctgctgcgacgctttttttctggcaagatagtcttgtaaatgcgggccaagatctgcacactggtatttcggtttttggggccgcgggcggcgacggggcccgtgcgtcccagcgcacatgttcggcgaggcggggcctgcgagcgcggccaccgagaatcggacgggggtagtctcaagctggccggcctgctctggtgcctggcctcgcgccgccgtgtatcgccccgccctgggcggcaaggctggcccggtcggcaccagttgcgtgagcggaaagatggccgcttcccggccctgctgcagggagctcaaaatggaggacgcggcgctcgggagagcgggcgggtgagtcacccacacaaaggaaaagggcctttccgtcctcagccgtcgcttcatgtgactccacggagtaccgggcgccgtccaggcacctcgattagttctcgagcttttggagtacgtcgtctttaggttggggggaggggttttatgcgatggagtttccccacactgagtgggtggagactgaagttaggccagcttggcacttgatgtaattctccttggaatttgccctttttgagtttggatcttggttcattctcaagcctcagacagtggttcaaagtttttttcttccatttcaggtgtcgtga

SEQ ID NO: 12 - DNA, 63 bp, Artificial Sequence
  source: /note="Description of Artificial Sequence: Synthetic oligonucleotide"
atggccctgcctgtgacagccctgctgctgcctctggctctgctgctgcatgccgctagaccc

SEQ ID NO: 13 - DNA, 135 bp, Artificial Sequence
  source: /note="Description of Artificial Sequence: Synthetic polynucleotide"
accacgacgccagcgccgcgaccaccaacaccggcgcccaccatcgcgtcgcagcccctgtccctgcgcccagaggcgtgccggccagcggcggggggcgcagtgcacacgagggggctggacttcgcctgtgat

SEQ ID NO: 14 - DNA, 690 bp, Artificial Sequence
  source: /note="Description of Artificial Sequence: Synthetic polynucleotide"
gagagcaagtacggccctccctgccccccttgccctgcccccgagttcctgggcggacccagcgtgttcctgttcccccccaagcccaaggacaccctgatgatcagccggacccccgaggtgacctgtgtggtggtggacgtgtcccaggaggaccccgaggtccagttcaactggtacgtggacggcgtggaggtgcacaacgccaagaccaagccccgggaggagcagttcaatagcacctaccgggtggtgtccgtgctgaccgtgctgcaccaggactggctgaacggcaaggaatacaagtgtaaggtgtccaacaagggcctgcccagcagcatcgagaaaaccatcagcaaggccaagggccagcctcgggagccccaggtgtacaccctgccccctagccaagaggagatgaccaagaaccaggtgtccctgacctgcctggtgaagggcttctaccccagcgacatcgccgtggagtgggagagcaacggccagcccgagaacaactacaagaccaccccccctgtgctggacagcgacggcagcttcttcctgtacagccggctgaccgtggacaagagccggtggcaggagggcaacgtctttagctgctccgtgatgcacgaggccctgcacaaccactacacccagaagagcctgagcctgtccctgggcaagatg

SEQ ID NO: 15 - DNA, 847 bp, Artificial Sequence
  source: /note="Description of Artificial Sequence: Synthetic polynucleotide"
aggtggcccgaaagtcccaaggcccaggcatctagtgttcctactgcacagccccaggcagaaggcagcctagccaaagctactactgcacctgccactacgcgcaatactggccgtggcggggaggagaagaaaaaggagaaagagaaagaagaacaggaagagagggagaccaagacccctgaatgtccatcccatacccagccgctgggcgtctatctcttgactcccgcagtacaggacttgtggcttagagataaggccacctttacatgtttcgtcgtgggctctgacctgaaggatgcccatttgacttgggaggttgccggaaaggtacccacagggggggttgaggaagggttgctggagcgccattccaatggctctcagagccagcactcaagactcacccttccgagatccctgtggaacgccgggacctctgtcacatgtactctaaatcatcctagcctgcccccacagcgtctgatggcccttagagagccagccgcccaggcaccagttaagcttagcctgaatctgctcgccagtagtgatcccccagaggccgccagctggctcttatgcgaagtgtccggctttagcccgcccaacatcttgctcatgtggctggaggaccagcgagaagtgaacaccagcggcttcgctccagcccggcccccaccccagccgggttctaccacattctgggcctggagtgtcttaagggtcccagcaccacctagcccccagccagccacatacacctgtgttgtgtcccatgaagatagcaggaccctgctaaatgcttctaggagtctggaggtttcctacgtgactgaccatt

SEQ ID NO: 16 - DNA, 30 bp, Artificial Sequence
  source: /note="Description of Artificial Sequence: Synthetic oligonucleotide"
ggtggcggaggttctggaggtggaggttcc

SEQ ID NO: 17 - DNA, 72 bp, Artificial Sequence
  source: /note="Description of Artificial Sequence: Synthetic oligonucleotide"
atctacatctgggcgcccttggccgggacttgtggggtccttctcctgtcactggttatcaccctttactgc

SEQ ID NO: 18 - DNA, 126 bp, Artificial Sequence
  source: /note="Description of Artificial Sequence: Synthetic polynucleotide"
aaacggggcagaaagaaactcctgtatatattcaaacaaccatttatgagaccagtacaaactactcaagaggaagatggctgtagctgccgatttccagaagaagaagaaggaggatgtgaactg

SEQ ID NO: 19 - DNA, 123 bp, Artificial Sequence
  source: /note="Description of Artificial Sequence: Synthetic polynucleotide"
aggagtaagaggagcaggctcctgcacagtgactacatgaacatgactccccgccgccccgggcccacccgcaagcattaccagccctatgccccaccacgcgacttcgcagcctatcgctcc

SEQ ID NO: 20 - DNA, 336 bp, Artificial Sequence
  source: /note="Description of Artificial Sequence: Synthetic polynucleotide"
agagtgaagttcagcaggagcgcagacgcccccgcgtacaagcagggccagaaccagctctataacgagctcaatctaggacgaagagaggagtacgatgttttggacaagagacgtggccgggaccctgagatggggggaaagccgagaaggaagaaccctcaggaaggcctgtacaatgaactgcagaaagataagatggcggaggcctacagtgagattgggatgaaaggcgagcgccggaggggcaaggggcacgatggcctttaccagggtctcagtacagccaccaaggacacctacgacgcccttcacatgcaggccctgccccctcgc

SEQ ID NO: 21 - DNA, 336 bp, Artificial Sequence
  source: /note="Description of Artificial Sequence: Synthetic polynucleotide"
agagtgaagttcagcaggagcgcagacgcccccgcgtaccagcagggccagaaccagctctataacgagctcaatctaggacgaagagaggagtacgatgttttggacaagagacgtggccgggaccctgagatggggggaaagccgagaaggaagaaccctcaggaaggcctgtacaatgaactgcagaaagataagatggcggaggcctacagtgagattgggatgaaaggcgagcgccggaggggcaaggggcacgatggcctttaccagggtctcagtacagccaccaaggacacctacgacgcccttcacatgcaggccctgccccctcgc

SEQ ID NO: 22 - protein, 373 aa, Artificial Sequence
  source: /note="Description of Artificial Sequence: Synthetic polypeptide"
PGWFLDSPDRPWNPPTFSPALLVVTEGDNATFTCSFSNTSESFVLNWYRMSPSNQTDKLAAFPEDRSQPGQDCRFRVTQLPNGRDFHMSVVRARRNDSGTYLCGAISLAPKAQIKESLRAELRVTERRAEVPTAHPSPSPRPAGQFQTLVTTTPAPRPPTPAPTIASQPLSLRPEACRPAAGGAVHTRGLDFACDIYIWAPLAGTCGVLLLSLVITLYCKRGRKKLLYIFKQPFMRPVQTTQEEDGCSCRFPEEEEGGCELRVKFSRSADAPAYKQGQNQLYNELNLGRREEYDVLDKRRGRDPEMGGKPRRKNPQEGLYNELQKDKMAEAYSEIGMKGERRRGKGHDGLYQGLSTATKDTYDALHMQALPPR

SEQ ID NO: 23 - DNA, 1182 bp, Artificial Sequence
  source: /note="Description of Artificial Sequence: Synthetic polynucleotide"
atggccctccctgtcactgccctgcttctccccctcgcactcctgctccacgccgctagaccacccggatggtttctggactctccggatcgcccgtggaatcccccaaccttctcaccggcactcttggttgtgactgagggcgataatgcgaccttcacgtgctcgttctccaacacctccgaatcattcgtgctgaactggtaccgcatgagcccgtcaaaccagaccgacaagctcgccgcgtttccggaagatcggtcgcaaccgggacaggattgtcggttccgcgtgactcaactgccgaatggcagagacttccacatgagcgtggtccgcgctaggcgaaacgactccgggacctacctgtgcggagccatctcgctggcgcctaaggcccaaatcaaagagagcttgagggccgaactgagagtgaccgagcgcagagctgaggtgccaactgcacatccatccccatcgcctcggcctgcggggcagtttcagaccctggtcacgaccactccggcgccgcgcccaccgactccggccccaactatcgcgagccagcccctgtcgctgaggccggaagcatgccgccctgccgccggaggtgctgtgcatacccggggattggacttcgcatgcgacatctacatttgggctcctctcgccggaacttgtggcgtgctccttctgtccctggtcatcaccctgtactgcaagcggggtcggaaaaagcttctgtacattttcaagcagcccttcatgaggcccgtgcaaaccacccaggaggaggacggttgctcctgccggttccccgaagaggaagaaggaggttgcgagctgcgcgtgaagttctcccggagcgccgacgcccccgcctataagcagggccagaaccagctgtacaacgaactgaacctgggacggcgggaagagtacgatgtgctggacaagcggcgcggccgggaccccgaaatgggcgggaagcctagaagaaagaaccctcaggaaggcctgtataacgagctgcagaaggacaagatggccgaggcctactccgaaattgggatgaagggagagcggcggaggggaaaggggcacgacggcctgtaccaaggactgtccaccgccaccaaggacacatacgatgccctgcacatgcaggcccttccccctcgc

SEQ ID NO: 24 - protein, 394 aa, Artificial Sequence
  source: /note="Description of Artificial Sequence: Synthetic polypeptide"
MALPVTALLLPLALLLHAARPPGWFLDSPDRPWNPPTFSPALLVVTEGDNATFTCSFSNTSESFVLNWYRMSPSNQTDKLAAFPEDRSQPGQDCRFRVTQLPNGRDFHMSVVRARRNDSGTYLCGAISLAPKAQIKESLRAELRVTERRAEVPTAHPSPSPRPAGQFQTLVTTTPAPRPPTPAPTIASQPLSLRPEACRPAAGGAVHTRGLDFACDIYIWAPLAGTCGVLLLSLVITLYCKRGRKKLLYIFKQPFMRPVQTTQEEDGCSCRFPEEEEGGCELRVKFSRSADAPAYKQGQNQLYNELNLGRREEYDVLDKRRGRDPEMGGKPRRKNPQEGLYNELQKDKMAEAYSEIGMKGERRRGKGHDGLYQGLSTATKDTYDALHMQALPPR

SEQ ID NO: 25 - protein, 5 aa, Artificial Sequence
  source: /note="Description of Artificial Sequence: Synthetic peptide"
GGGGS

SEQ ID NO: 26 - protein, 30 aa, Artificial Sequence
  source: /note="Description of Artificial Sequence: Synthetic polypeptide"
  MISC_FEATURE (1)..(30): /note="This sequence may encompass 1-6 'Gly Gly Gly Gly Ser' repeating units"
  source: /note="See specification as filed for detailed description of substitutions and preferred embodiments"
GGGGSGGGGSGGGGSGGGGSGGGGSGGGGS

SEQ ID NO: 27 - protein, 20 aa, Artificial Sequence
  source: /note="Description of Artificial Sequence: Synthetic peptide"
GGGGSGGGGSGGGGSGGGGS

SEQ ID NO: 28 - protein, 15 aa, Artificial Sequence
  source: /note="Description of Artificial Sequence: Synthetic peptide"
GGGGSGGGGSGGGGS

SEQ ID NO: 29 - protein, 4 aa, Artificial Sequence
  source: /note="Description of Artificial Sequence: Synthetic peptide"
GGGS

SEQ ID NO: 30 - DNA, 5000 bp, Artificial Sequence
  source: /note="Description of Artificial Sequence: Synthetic polynucleotide"
  misc_feature (1)..(5000): /note="This sequence may encompass 50-5000 nucleotides"
  source: /note="See specification as filed for detailed description of substitutions and preferred embodiments"
aaaaaaaaaaaaaaaaaaaaaaaaaaaaaaaaaaaaaaaaaaaaaaaaaaaaaaaaaaaaaaaaaaaaaaaaaaaaaaaaaaaaaaaaaaaaaaaaaaaaaaaaaaaaaaaaaaaaaaaaaaaaaaaaaaaaaaaaaaaaaaaaaaaaaaaaaaaaaaaaaaaaaaaaaaaaaaaaaaaaaaaaaaaaaaaaaaaaaaaaaaaaaaaaaaaaaaaaaaaaaaaaaaaaaaaaaaaaaaaaaaaaaaaaaaaaaaaaaaaaaaaaaaaaaaaaaaaaaaaaaaaaaaaaaaaaaaaaaaaaaaaaaaaaaaaaaaaaaaaaaaaaaaaaaaaaaaaaaaaaaaaaaaaaaaaaaaaaaaaaaaaaaaaaaaaaaaaaaaaaaaaaaaaaaaaaaaaaaaaaaaaaaaaaaaaaaaaaaaaaaaaaaaaaaaaaaaaaaaaaaaaaaaaaaaaaaaaaaaaaaaaaaaaaaaaaaaaaaaaaaaaaaaaaaaaaaaaaaaaaaaaaaaaaaaaaaaaaaaaaaaaaaaaaaaaaaaaaaaaaaaaaaaaaaaaaaaaaaaaaaaaaaaaaaaaaaaaaaaaaaaaaaaaaaaaaaaaaaaaaaaaaaaaaaaaaaaaaaaaaaaaaaaaaaaaaaaaaaaaaaaaaaaaaaaaaaaaaaaaaaaaaaaaaaaaaaaaaaaaaaaaaaaaaaaaaaaaaaaaaaaaaaaaaaaaaaaaaaaaaaaaaaaaaaaaaaaaaaaaaaaaaaaaaaaaaaaaaaaaaaaaaaaaaaaaaaaaaaaaaaaaaaaaaaaaaaaaaaaaaaaaaaaaaaaaaaaaaaaaaaaaaaaaaaaaaaaaaaaaaaaaaaaaaaaaaaaaaaaaaaaaaaaaaaaaaaaaaaaaaaaaaaaaaaaaaaaaaaaaaaaaaaaaaaaaaaaaaaaaaaaaaaaaaaaaaaaaaaaaaaaaaaaaaaaaaaaaaaaaaaaaaaaaaaaaaaaaaaaaaaaaaaaaaaaaaaaaaaaaaaaaaaaaaaaaaaaaaaaaaaaaaaaaaaaaaaaaaaaaaaaaaaaaaaaaaaaaaaaaaaaaaaaaaaaaaaaaaaaaaaaaaaaaaaaaaaaaaaaaaaaaaaaaaaaaaaaaaaaaaaaaaaaaaaaaaaaaaaaaaaaaaaaaaaaaaaaaaaaaaaaaaaaaaaaaaaaaaaaaaaaaaaaaaaaaaaaaaaaaaaaaaaaaaaaaaaaaaaaaaaaaaaaaaaaaaaaaaaaaaaaaaaaaaaaaaaaaaaaaaaaaaaaaaaaaaaaaaaaaaaaaaaaaaaaaaaaaaaaaaaaaaaaaaaaaaaaaaaaaaaaaaaaaaaaaaaaaaaaaaaaaaaaaaaaaaaaaaaaaaaaaaaaaaaaaaaaaaaaaaaaaaaaaaaaaaaaaaaaaaaaaaaaaaaaaaaaaaaaaaaaaaaaaaaaaaaaaaaaaaaaaaaaaaaaaaaaaaaaaaaaaaaaaaaaaaaaaaaaaaaaaaaaaaaaaaaaaaaaaaaaaaaaaaaaaaaaaaaaaaaaaaaaaaaaaaaaaaaaaaaaaaaaaaaaaaaaaaaaaaaaaaaaaaaaaaaaaaaaaaaaaaaaaaaaaaaaaaaaaaaaaaaaaaaaaaaaaaaaaaaaaaaaaaaaaaaaaaaaaaaaaaaaaaaaaaaaaaaaaaaaaaaaaaaaaaaaaaaaaaaaaaaaaaaaaaaaaaaaaaaaaaaaaaaaaaaaaaaaaaaaaaaaaaaaaaaaaaaaaaaaaaaaaaaaaaaaaaaaaaaaaaaaaaaaaaaaaaaaaaaaaaaaaaaaaaaaaaaaaaaaaaaaaaaaaaaaaaaaaaaaaaaaaaaaaaaaaaaaaaaaaaaaaaaaaaaaaaaaaaaaaaaaaaaaaaaaaaaaaaaaaaaaaaaaaaaaaaaaaaaaaaaaaaaaaaaaaaaaaaaaaaaaaaaaaaaaaaaaaaaaaaaaaaaaaaaaaaaaaaaaaaaaaaaaaaaaaaaaaaaaaaaaaaaaaaaaaaaaaaaaaaaaaaaaaaaaaaaaaaaaaaaaaaaaaaaaaaaaaaaaaaaaaaaaaaaaaaaaaaaaaaaaaaaaaaaaaaaaaaaaaaaaaaaaaaaaaaaaaaaaaaaaaaaaaaaaaaaaaaaaaaaaaaaaaaaaaaaaaaaaaaaaaaaaaaaaaaaaaaaaaaaaaaaaaaaaaaaaaaaaaaaaaaaaaaaaaaaaaaaaaaaaaaaaaaaaaaaaaaaaaaaaaaaaaaaaaaaaaaaaaaaaaaaaaaaaaaaaaaaaaaaaaaaaaaaaaaaaaaaaaaaaaaaaaaaaaaaaaaaaaaaaaaaaaaaaaaaaaaaaaaaaaaaaaaaaaaaaaaaaaaaaaaaaaaaaaaaaaaaaaaaaaaaaaaaaaaaaaaaaaaaaaaaaaaaaaaaaaaaaaaaaaaaaaaaaaaaaaaaaaaaaaaaaaaaaaaaaaaaaaaaaaaaaaaaaaaaaaaaaaaaaaaaaaaaaaaaaaaaaaaaaaaaaaaaaaaaaaaaaaaaaaaaaaaaaaaaaaaaaaaaaaaaaaaaaaaaaaaaaaaaaaaaaaaaaaaaaaaaaaaaaaaaaaaaaaaaaaaaaaaaaaaaaaaaaaaaaaaaaaaaaaaaaaaaaaaaaaaaaaaaaaaaaaaaaaaaaaaaaaaaaaaaaaaaaaaaaaaaaaaaaaaaaaaaaaaaaaaaaaaaaaaaaaaaaaaaaaaaaaaaaaaaaaaaaaaaaaaaaaaaaaaaaaaaaaaaaaaaaaaaaaaaaaaaaaaaaaaaaaaaaaaaaaaaaaaaaaaaaaaaaaaaaaaaaaaaaaaaaaaaaaaaaaaaaaaaaaaaaaaaaaaaaaaaaaaaaaaaaaaaaaaaaaaaaaaaaaaaaaaaaaaaaaaaaaaaaaaaaaaaaaaaaaaaaaaaaaaaaaaaaaaaaaaaaaaaaaaaaaaaaaaaaaaaaaaaaaaaaaaaaaaaaaaaaaaaaaaaaaaaaaaaaaaaaaaaaaaaaaaaaaaaaaaaaaaaaaaaaaaaaaaaaaaaaaaaaaaaaaaaaaaaaaaaaaaaaaaaaaaaaaaaaaaaaaaaaaaaaaaaaaaaaaaaaaaaaaaaaaaaaaaaaaaaaaaaaaaaaaaaaaaaaaaaaaaaaaaaaaaaaaaaaaaaaaaaaaaaaaaaaaaaaaaaaaaaaaaaaaaaaaaaaaaaaaaaaaaaaaaaaaaaaaaaaaaaaaaaaaaaaaaaaaaaaaaaaaaaaaaaaaaaaaaaaaaaaaaaaaaaaaaaaaaaaaaaaaaaaaaaaaaaaaaaaaaaaaaaaaaaaaaaaaaaaaaaaaaaaaaaaaaaaaaaaaaaaaaaaaaaaaaaaaaaaaaaaaaaaaaaaaaaaaaaaaaaaaaaaaaaaaaaaaaaaaaaaaaaaaaaaaaaaaaaaaaaaaaaaaaaaaaaaaaaaaaaaaaaaaaaaaaaaaaaaaaaaaaaaaaaaaaaaaaaaaaaaaaaaaaaaaaaaaaaaaaaaaaaaaaaaaaaaaaaaaaaaaaaaaaaaaaaaaaaaaaaaaaaaaaaaaaaaaaaaaaaaaaaaaaaaaaaaaaaaaaaaaaaaaaaaaaaaaaaaaaaaaaaaaaaaaaaaaaaaaaaaaaaaaaaaaaaaaaaaaaaaaaaaaaaaaaaaaaaaaaaaaaaaaaaaaaaaaaaaaaaaaaaaaaaaaaaaaaaaaaaaaaaaaaaaaaaaaaaaaaaaaaaaaaaaaaaaaaaaaaaaaaaaaaaaaaaaaaaaaaaaaaaaaaaaaaaaaaaaaaaaaaaaaaaaaaaaaaaaaaaaaaaaaaaaaaaaaaaaaaaaaaaaaaaaaaaaaaaaaaaaaaaaaaaaaaaaaaaaaaaaaaaaaaaaaaaaaaaaaaaaaaaaaaaaaaaaaaaaaaaaaaaaaaaaaaaaaaaaaaaaaaaaaaaaaaaaaaaaaaaaaaaaaaaaaaaaaaaaaaaaaaaaaaaaaaaaaaaaaaaaaaaaaaaaaaaaaaaaaaaaaaaaaaaaaaaaaaaaaaaaaaaaaaaaaaaaaaaaaaaaaaaaaaaaaaaaaaaaaaaaaaaaaaaaaaaaaaaaaaaaaaaaaaaaaaaaaaaaaaaaaaaaaaaaaaaaaaaaaaaaaaaaaaaaaaaaaaaaaaaaaaaaaaaaaaaaaaaaaaaaaaaaaaaaaaaaaaaaaaaaaaaaaaaaaaaaaaaaaaaaaaaaaaaaaaaaaaaaaaaaaaaaaaaaaaaaaaaaaaaaaaaaaaaaaaaaaaaaaaaaaaaaaaaaaaaaaaaaaaaaaaaaaaaaaaaaaaaaaaaaaaaaaaaaaaaaaaaaaaaaaaaaaaaaaaaaaaaaaaaaaaaaaaaaaaaaaaaaaaaaaaaaaaaaaaaaaaaaaaaaaaaaaaaaaaaaaaaaaaaaaaaaaaaaaaaaaaaaaaaaaaaaaaaaaaaaaaaaaaaaaaaaaaaaaaaaaaaaaaaaaaaaaaaaaaaaaaaaaaaaaaaaaaaaaaaaaaaaaaaaaaaaaaaaaaaaaaaaaaaaaaaaaaaaaaaaaaaaaaaaaaaaaaaaaaaaaaaaaaaaaaaaaaaaaaaaaaaaaaaaaaaaaaaaaaaaaaaaaaaaaaaaaaaaaaaaaaaaaaaaaaaaaaaaaaaaaaaaaaaaaaaaaaaaaaaaaaaaaaaaaaaaaaaaaaaaaaaaaaaaaaaaaaaaaaaaaaaaaaaaaaaaaaaaaaaaaaaaaaaaaaaaaaaaaaaaaaaaaaaaaaaaaaaaaaaaaaaaaaaaaaaaaaaaaaaaaaaaaaaaaaaaaaaaaaaaaaaaaaaaaaaaaaaaaaaaaaaaaaaaaaaaaaaaaaaaaaaaaaaaaaaaaaaaaaaaaaaaaaaaaaaaaaaaaaaaaaaaaaaaaaaaaaaaaaaaaaaaaaaaaaaaaaaaaaaaaaaaaaaaaaaaaaaaaaaaaaaaaaaaaaaaaaaaaaaaaaaaaaaaaaaaaaaaaaaaaaaaaaaaaaaaaaaaaaaaaaaaaaaaaaaaaaaaaaaaaaaaaaaaaa

SEQ ID NO: 31 - DNA, 100 bp, Artificial Sequence
  source: /note="Description of Artificial Sequence: Synthetic polynucleotide"
tttttttttttttttttttttttttttttttttttttttttttttttttttttttttttttttttttttttttttttttttttttttttttttttttttt

SEQ ID NO: 32 - DNA, 5000 bp, Artificial Sequence
  source: /note="Description of Artificial Sequence: Synthetic polynucleotide"
  misc_feature (1)..(5000): /note="This sequence may encompass 50-5000 nucleotides"
  source: /note="See specification as filed for detailed description of substitutions and preferred embodiments"
tttttttttttttttttttttttttttttttttttttttttttttttttttttttttttttttttttttttttttttttttttttttttttttttttttttttttttttttttttttttttttttttttttttttttttttttttttttttttttttttttttttttttttttttttttttttttttttttttttttttttttttttttttttttttttttttttttttttttttttttttttttttttttttttttttttttttttttttttttttttttttttttttttttttttttttttttttttttttttttttttttttttttttttttttttttttttttttttttttttttttttttttttttttttttttttttttttttttttttttttttttttttttttttttttttttttttttttttttttttttttttttttttttttttttttttttttttttttttttttttttttttttttttttttttttttttttttttttttttttttttttttttttttttttttttttttttttttttttttttttttttttttttttttttttttttttttttttttttttttttttttttttttttttttttttttttttttttttttttttttttttttttttttttttttttttttttttttttttttttttttttttttttttttttttttttttttttttttttttttttttttttttttttttttttttttttttttttttttttttttttttttttttttttttttttttttttttttttttttttttttttttttttttttttttttttttttttttttttttttttttttttttttttttttttttttttttttttttttttttttttttttttttttttttttttttttttttttttttttttttttttttttttttttttttttttttttttttttttttttttttttttttttttttttttttttttttttttttttttttttttttttttttttttttttttttttttttttttttttttttttttttttttttttttttttttttttttttttttttttttttttttttttttttttttttttttttttttttttttttttttttttttttttttttttttttttttttttttttttttttttttttttttttttttttttttttttttttttttttttttttttttttttttttttttttttttttttttttttttttttttttttttttttttttttttttttttttttttttttttttttttttttttttttttttttttttttttttttttttttttttttttttttttttttttttttttttttttttttttttttttttttttttttttttttttttttttttttttttttttttttttttttttttttttttttttttttttttttttttttttttttttttttttttttttttttttttttttttttttttttttttttttttttttttttttttttttttttttttttttttttttttttttttttttttttttttttttttttttttttttttttttttttttttttttttttttttttttttttttttttttttttttttttttttttttttttttttttttttttttttttttttttttttttttttttttttttttttttttttttttttttttttttttttttttttttttttttttttttttttttttttttttttttttttttttttttttttttttttttttttttttttttttttttttttttttttttttttttttttttttttttttttttttttttttttttttttttttttttttttttttttttttttttttttttttttttttttttttttttttttttttttttttttttttttttttttttttttttttttttttttttttttttttttttttttttttttttttttttttttttttttttttttttttttttttttttttttttttttttttttttttttttttttttttttttttttttttttttttttttttttttttttttttttttttttttttttttttttttttttttttttttttttttttttttttttttttttttttttttttttttttttttttttttttttttttttttttttttttttttttttttttttttttttttttttttttttttttttttttttttttttttttttttttttttttttttttttttttttttttttttttttttttttttttttttttttttttttttttttttttttttttttttttttttttttttttttttttttttttttttttttttttttttttttttttttttttttttttttttttttttttttttttttttttttttttttttttttttttttttttttttttttttttttttttttttttttttttttttttttttttttttttttttttttttttttttttttttttttttttttttttttttttttttttttttttttttttttttttttttttttttttttttttttttttttttttttttttttttttttttttttttttttttttttttttttttttttttttttttttttttttttttttttttttttttttttttttttttttttttttttttttttttttttttttttttttttttttttttttttttttttttttttttttttttttttttttttttttttttttttttttttttttttttttttttttttttttttttttttttttttttttttttttttttttttttttttttttttttttttttttttttttttttttttttttttttttttttttttttttttttttttttttttttttttttttttttttttttttttttttttttttttttttttttttttttttttttttttttttttttttttttttttttttttttttttttttttttttttttttttttttttttttttttttttttttttttttttttttttttttttttttttttttttttttttttttttttttttttttttttttttttttttttttttttttttttttttttttttttttttttttttttttttttttttttttttttttttttttttttttttttttttttttttttttttttttttttttttttttttttttttttttttttttttttttttttttttttttttttttttttttttttttttttttttttttttttttttttttttttttttttttttttttttttttttttttttttttttttttttttttttttttttttttttttttttttttttttttttttttttttttttttttttttttttttttttttttttttttttttttttttttttttttttttttttttttttttttttttttttttttttttttttttttttttttttttttttttttttttttttttttttttttttttttttttttttttttttttttttttttttttttttttttttttttttttttttttttttttttttttttttttttttttttttttttttttttttttttttttttttttttttttttttttttttttttttttttttttttttttttttttttttttttttttttttttttttttttttttttttttttttttttttttttttttttttttttttttttttttttttttttttttttttttttttttttttttttttttttttttttttttttttttttttttttttttttttttttttttttttttttttttttttttttttttttttttttttttttttttttttttttttttttttttttttttttttttttttttttttttttttttttttttttttttttttttttttttttttttttttttttttttttttttttttttttttttttttttttttttttttttttttttttttttttttttttttttttttttttttttttttttttttttttttttttttttttttttttttttttttttttttttttttttttttttttttttttttttttttttttttttttttttttttttttttttttttttttttttttttttttttttttttttttttttttttttttttttttttttttttttttttttttttttttttttttttttttttttttttttttttttttttttttttttttttttttttttttttttttttttttttttttttttttttttttttttttttttttttttttttttttttttttttttttttttttttttttttttttttttttttttttttttttttttttttttttttttttttttttttttttttttttttttttttttttttttttttttttttttttttttttttttttttttttttttttttttttttttttttttttttttttttttttttttttttttttttttttttttttttttttttttttttttttttttttttttttttttttttttttttttttttttttttttttttttttttttttttttttttttttttttttttttttttttttttttttttttttttttttttttttttttttttttttttttttttttttttttttttttttttttttttttttttttttttttttttttttttttttttttttttttttttttttttttttttttttttttttttttttttttttttttttttttttttttttttttttttttttttttttttttttttttttttttttttttttttttttttttttttttttttttttttttttttttttttttttttttttttttttttttttttttttttttttttttttttttttttttttttttttttttttttttttttttttttttttttttttttttttttttttttttttttttttttttttttttttttttttttttttttttttttttttttttttttttttttttttttttttttttttttttttttttttttttttttttttttttttttttttttttttttt

SEQ ID NO: 33 - DNA, 5000 bp, Artificial Sequence; identical to SEQ ID NO: 30
  source: /note="Description of Artificial Sequence: Synthetic polynucleotide"
  misc_feature (1)..(5000): /note="This sequence may encompass 100-5000 nucleotides"
  source: /note="See specification as filed for detailed description of substitutions and preferred embodiments"

SEQ ID NO: 34 - DNA, 400 bp, Artificial Sequence
  source: /note="Description of Artificial Sequence: Synthetic polynucleotide"
  misc_feature (1)..(400): /note="This sequence may encompass 100-400 nucleotides"
  source: /note="See specification as filed for detailed description of substitutions and preferred embodiments"
aaaaaaaaaaaaaaaaaaaaaaaaaaaaaaaaaaaaaaaaaaaaaaaaaaaaaaaaaaaaaaaaaaaaaaaaaaaaaaaaaaaaaaaaaaaaaaaaaaaaaaaaaaaaaaaaaaaaaaaaaaaaaaaaaaaaaaaaaaaaaaaaaaaaaaaaaaaaaaaaaaaaaaaaaaaaaaaaaaaaaaaaaaaaaaaaaaaaaaaaaaaaaaaaaaaaaaaaaaaaaaaaaaaaaaaaaaaaaaaaaaaaaaaaaaaaaaaaaaaaaaaaaaaaaaaaaaaaaaaaaaaaaaaaaaaaaaaaaaaaaaaaaaaaaaaaaaaaaaaaaaaaaaaaaaaaaaaaaaaaaaaaaaaaaaaaaaaaaaaaaaaaaaaaaaaaaaaaaaaaaaaaaaaaaaaaaaaaaaaa

SEQ ID NO: 35 - DNA, 2000 bp, Artificial Sequence
  source: /note="Description of Artificial Sequence: Synthetic polynucleotide"
  misc_feature (1)..(2000): /note="This sequence may encompass 50-2000 nucleotides"
  source: /note="See specification as filed for detailed description of substitutions and preferred embodiments"
aaaaaaaaaaaaaaaaaaaaaaaaaaaaaaaaaaaaaaaaaaaaaaaaaaaaaaaaaaaaaaaaaaaaaaaaaaaaaaaaaaaaaaaaaaaaaaaaaaaaaaaaaaaaaaaaaaaaaaaaaaaaaaaaaaaaaaaaaaaaaaaaaaaaaaaaaaaaaaaaaaaaaaaaaaaaaaaaaaaaaaaaaaaaaaaaaaaaaaaaaaaaaaaaaaaaaaaaaaaaaaaaaaaaaaaaaaaaaaaaaaaaaaaaaaaaaaaaaaaaaaaaaaaaaaaaaaaaaaaaaaaaaaaaaaaaaaaaaaaaaaaaaaaaaaaaaaaaaaaaaaaaaaaaaaaaaaaaaaaaaaaaaaaaaaaaaaaaaaaaaaaaaaaaaaaaaaaaaaaaaaaaaaaaaaaaaaaaaaaaaaaaaaaaaaaaaaaaaaaaaaaaaaaaaaaaaaaaaaaaaaaaaaaaaaaaaaaaaaaaaaaaaaaaaaaaaaaaaaaaaaaaaaaaaaaaaaaaaaaaaaaaaaaaaaaaaaaaaaaaaaaaaaaaaaaaaaaaaaaaaaaaaaaaaaaaaaaaaaaaaaaaaaaaaaaaaaaaaaaaaaaaaaaaaaaaaaaaaaaaaaaaaaaaaaaaaaaaaaaaaaaaaaaaaaaaaaaaaaaaaaaaaaaaaaaaaaaaaaaaaaaaaaaaaaaaaaaaaaaaaaaaaaaaaaaaaaaaaaaaaaaaaaaaaaaaaaaaaaaaaaaaaaaaaaaaaaaaaaaaaaaaaaaaaaaaaaaaaaaaaaaaaaaaaaaaaaaaaaaaaaaaaaaaaaaaaaaaaaaaaaaaaaaaaaaaaaaaaaaaaaaaaaaaaaaaaaaaaaaaaaaaaaaaaaaaaaaaaaaaaaaaaaaaaaaaaaaaaaaaaaaaaaaaaaaaaaaaaaaaaaaaaaaaaaaaaaaaaaaaaaaaaaaaaaaaaaaaaaaaaaaaaaaaaaaaaaaaaaaaaaaaaaaaaaaaaaaaaaaaaaaaaaaaaaaaaaaaaaaaaaaaaaaaaaaaaaaaaaaaaaaaaaaaaaaaaaaaaaaaaaaaaaaaaaaaaaaaaaaaaaaaaaaaaaaaaaaaaaaaaaaaaaaaaaaaaaaaaaaaaaaaaaaaaaaaaaaaaaaaaaaaaaaaaaaaaaaaaaaaaaaaaaaaaaaaaaaaaaaaaaaaaaaaaaaaaaaaaaaaaaaaaaaaaaaaaaaaaaaaaaaaaaaaaaaaaaaaaaaaaaaaaaaaaaaaaaaaaaaaaaaaaaaaaaaaaaaaaaaaaaaaaaaaaaaaaaaaaaaaaaaaaaaaaaaaaaaaaaaaaaaaaaaaaaaaaaaaaaaaaaaaaaaaaaaaaaaaaaaaaaaaaaaaaaaaaaaaaaaaaaaaaaaaaaaaaaaaaaaaaaaaaaaaaaaaaaaaaaaaaaaaaaaaaaaaaaaaaaaaaaaaaaaaaaaaaaaaaaaaaaaaaaaaaaaaaaaaaaaaaaaaaaaaaaaaaaaaaaaaaaaaaaaaaaaaaaaaaaaaaaaaaaaaaaaaaaaaaaaaaaaaaaaaaaaaaaaaaaaaaaaaaaaaaaaaaaaaaaaaaaaaaaaaaaaaaaaaaaaaaaaaaaaaaaaaaaaaaaaaaaaaaaaaaaaaaaaaaaaaaaaaaaaaaaaaaaaaaaaaaaaaaaaaaaaaaaaaaaaaaaaaaaaaaaaaaaaaaaaaaaaaaaaaaaaaaaaaaaaaaaaaaaaaaaaaaaaaaaaaaaaaaaaaaaaaaaaaaaaaaaaaaaaaaaaaaaaaaaaaaaaaaaaaaaaaaaaaaaaaaaaaaaaaaaaaaaaaaaaaaaaaaaaaaaaaaaaaaaaaaaaaaaaaaaaaaaaaaaaaaaaaaaaaaaaaaaaaaaaaaaaaaaaaaaaaaaaaaaaaaaaaaaaaaaaaaaaaaaaaaaaaaaaaaaaaaaaaaaaaaaaaaaaaaaaaaaaaaaaaaaaaaaaaaaaaaaaaaaaaaaaaaaaaaaaaaaaaaaaaaaaaaaaaaaaaaaaaaaaa

SEQ ID NO: 36-37 - skipped (2 entries)

SEQ ID NO: 38 - protein, 40 aa, Artificial Sequence
  source: /note="Description of Artificial Sequence: Synthetic polypeptide"
  MISC_FEATURE (1)..(40): /note="This sequence may encompass 1-10 'Gly Gly Gly Ser' repeating units, wherein some positions may be absent"
  source: /note="See specification as filed for detailed description of substitutions and preferred embodiments"
GGGSGGGSGGGSGGGSGGGSGGGSGGGSGGGSGGGSGGGS

SEQ ID NO: 39 - DNA, 1461 bp, Artificial Sequence
  source: /note="Description of Artificial Sequence: Synthetic polynucleotide"
atggccctccctgtcaccgccctgctgcttccgctggctcttctgctccacgccgctcggccccaagtccaactcgtccagtcaggagcggaagtcaagaagcccggagcgtcagtcaaagtgtcatgcaaagcctcgggctacactttcactgggtactacatgcactgggtgcgccaggctccaggacagggactggaatggatgggatggatcaacccgaactccggtggcaccaattacgcccagaagttccaggggagggtgaccatgactcgcgacacgtcgatcagcaccgcatacatggagctgtcaagactccggtccgacgatactgccgtgtactactgcgcacgggacatgaacattctggccaccgtgccttttgacatctggggtcagggaactatggttaccgtgtcctctggtggaggcggctccggcggggggggaagcggaggcggtggaagcgacattcagatgacccagtcgccttcatccctttcggcgagcgtgggagatcgcgtcactatcacttgtcgggcctcgcagtccatctccacctacctcaattggtaccagcagaagccaggaaaagcaccgaatctgctgatctacgccgcgttttccttgcaatcgggagtgccaagcagattcagcggatcgggatcaggcactgatttcaccctcaccatcaactcgctgcaaccggaggatttcgctacgtactattgccaacaaggagacagcgtgccgctcaccttcggcggagggactaagctggaaatcaagaccactaccccagcaccgaggccacccaccccggctcctaccatcgcctcccagcctctgtccctgcgtccggaggcatgtagacccgcagctggtggggccgtgcatacccggggtcttgacttcgcctgcgatatctacatttgggcccctctggctggtacttgcggggtcctgctgctttcactcgtgatcactctttactgtaagcgcggtcggaagaagctgctgtacatctttaagcaacccttcatgaggcctgtgcagactactcaagaggaggacggctgttcatgccggttcccagaggaggaggaaggcggctgcgaactgcgcgtgaaattcagccgcagcgcagatgctccagcctacaagcaggggcagaaccagctctacaacgaactcaatcttggtcggagagaggagtacgacgtgctggacaagcggagaggacgggacccagaaatgggcgggaagccgcgcagaaagaatccccaagagggcctgtacaacgagctccaaaaggataagatggcagaagcctatagcgagattggtatgaaaggggaacgcagaagaggcaaaggccacgacggactgtaccagggactcagcaccgccaccaaggacacctatgacgctcttcacatgcaggccctgccgcctcgg

SEQ ID NO: 40 - DNA, 1461 bp, Artificial Sequence
  source: /note="Description of Artificial Sequence: Synthetic polynucleotide"
atggccctccctgtcaccgccctgctgcttccgctggctcttctgctccacgccgctcggccccaagtgcaactcgtccaaagcggagcggaagtcaagaaacccggagcgagcgtgaaagtgtcctgcaaagcctccggctacacctttacgggctactacatgcactgggtgcgccaggcaccaggacagggtcttgaatggatgggatggatcaaccctaattcgggcggaactaactacgcacagaagttccaggggagagtgactctgactcgggatacctccatctcaactgtctacatggaactctcccgcttgcggtcagatgatacggcagtgtactactgcgcccgcgacatgaatatcctggctaccgtgccgttcgacatctggggacaggggactatggttactgtctcatcgggcggtggaggttcaggaggaggcggctcgggaggcggaggttcggacattcagatgacccagtccccatcctctctgtcggccagcgtcggagatagggtgaccattacctgtcgggcctcgcaaagcatctcctcgtacctcaactggtatcagcaaaagccgggaaaggcgcctaagctgctgatctacgccgcttcgagcttgcaaagcggggtgccatccagattctcgggatcaggctcaggaaccgacttcaccctgaccgtgaacagcctccagccggaggactttgccacttactactgccagcagggagactccgtgccgcttactttcggggggggtacccgcctggagatcaagaccactaccccagcaccgaggccacccaccccggctcctaccatcgcctcccagcctctgtccctgcgtccggaggcatgtagacccgcagctggtggggccgtgcatacccggggtcttgacttcgcctgcgatatctacatttgggcccctctggctggtacttgcggggtcctgctgctttcactcgtgatcactctttactgtaagcgcggtcggaagaagctgctgtacatctttaagcaacccttcatgaggcctgtgcagactactcaagaggaggacggctgttcatgccggttcccagaggaggaggaaggcggctgcgaactgcgcgtgaaattcagccgcagcgcagatgctccagcctacaagcaggggcagaaccagctctacaacgaactcaatcttggtcggagagaggagtacgacgtgctggacaagcggagaggacgggacccagaaatgggcgggaagccgcgcagaaagaatccccaagagggcctgtacaacgagctccaaaaggataagatggcagaagcctatagcgagattggtatgaaaggggaacgcagaagaggcaaaggccacgacggactgtaccagggactcagcaccgccaccaaggacacctatgacgctcttcacatgcaggccctgccgcctcgg

SEQ ID NO: 41 - DNA, 1461 bp, Artificial Sequence
  source: /note="Description of Artificial Sequence: Synthetic polynucleotide"
atggccctccctgtcaccgccctgctgcttccgctggctcttctgctccacgccgctcggccccaagtccaactcgttcaatccggcgcagaagtcaagaagccaggagcatcagtgaaagtgtcctgcaaagcctcaggctacatcttcacgggatactacatccactgggtgcgccaggctccgggccagggccttgagtggatgggctggatcaaccctaactctgggggaaccaactacgctcagaagttccaggggagggtcactatgactcgcgatacctccatctccactgcgtacatggaactctcgggactgagatccgacgatcctgccgtgtactactgcgcccgggacatgaacatcttggcgaccgtgccgtttgacatttggggacagggcaccctcgtcactgtgtcgagcggtggaggaggctcggggggtggcggatcaggagggggaggaagcgacatccagctgactcagagcccatcgtcgttgtccgcgtcggtgggggatagagtgaccattacttgccgcgccagccagagcatctcatcatatctgaattggtaccagcagaagcccggaaaggccccaaaactgctgatctacgctgcaagcagcctccaatcgggagtgccgtcacggttctccgggtccggttcgggaactgactttaccctgaccgtgaattcgctgcaaccggaggatttcgccacgtactactgtcagcaaggagactccgtgccgctgaccttcggtggaggcaccaaggtcgaaatcaagaccactaccccagcaccgaggccacccaccccggctcctaccatcgcctcccagcctctgtccctgcgtccggaggcatgtagacccgcagctggtggggccgtgcatacccggggtcttgacttcgcctgcgatatctacatttgggcccctctggctggtacttgcggggtcctgctgctttcactcgtgatcactctttactgtaagcgcggtcggaagaagctgctgtacatctttaagcaacccttcatgaggcctgtgcagactactcaagaggaggacggctgttcatgccggttcccagaggaggaggaaggcggctgcgaactgcgcgtgaaattcagccgcagcgcagatgctccagcctacaagcaggggcagaaccagctctacaacgaactcaatcttggtcggagagaggagtacgacgtgctggacaagcggagaggacgggacccagaaatgggcgggaagccgcgcagaaagaatccccaagagggcctgtacaacgagctccaaaaggataagatggcagaagcctatagcgagattggtatgaaaggggaacgcagaagaggcaaaggccacgacggactgtaccagggactcagcaccgccaccaaggacacctatgacgctcttcacatgcaggccctgccgcctcgg

SEQ ID NO: 42 - DNA, 1467 bp, Artificial Sequence
  source: /note="Description of Artificial Sequence: Synthetic polynucleotide"
atggccctccctgtcaccgccctgctgcttccgctggctcttctgctccacgccgctcggccccaagtccaactccaacagtcaggcgcagaagtgaaaaagagcggtgcatcggtgaaagtgtcatgcaaagcctcgggctacaccttcactgactactatatgcactggctgcggcaggcaccgggacagggacttgagtggatgggatggatcaacccgaattcaggggacactaactacgcgcagaagttccaggggagagtgaccctgacgagggacacctcaatttcgaccgtctacatggaattgtcgcgcctgagatcggacgatactgctgtgtactactgtgcccgcgacatgaacatcctcgcgactgtgccttttgatatctggggacaggggactatggtcaccgtttcctccgcttccggtggcggaggctcgggaggccgggcctccggtggaggaggcagcgacatccagatgactcagagcccttcctcgctgagcgcctcagtgggagatcgcgtgaccatcacttgccgggccagccagtccatttcgtcctacctcaattggtaccagcagaagccgggaaaggcgcccaagctcttgatctacgctgcgagctccctgcaaagcggggtgccgagccgattctcgggttccggctcgggaaccgacttcactctgaccatctcatccctgcaaccagaggactttgccacctactactgccaacaaggagattctgtcccactgacgttcggcggaggaaccaaggtcgaaatcaagaccactaccccagcaccgaggccacccaccccggctcctaccatcgcctcccagcctctgtccctgcgtccggaggcatgtagacccgcagctggtggggccgtgcatacccggggtcttgacttcgcctgcgatatctacatttgggcccctctggctggtacttgcggggtcctgctgctttcactcgtgatcactctttactgtaagcgcggtcggaagaagctgctgtacatctttaagcaacccttcatgaggcctgtgcagactactcaagaggaggacggctgttcatgccggttcccagaggaggaggaaggcggctgcgaactgcgcgtgaaattcagccgcagcgcagatgctccagcctacaagcaggggcagaaccagctctacaacgaactcaatcttggtcggagagaggagtacgacgtgctggacaagcggagaggacgggacccagaaatgggcgggaagccgcgcagaaagaatccccaagagggcctgtacaacgagctccaaaaggataagatggcagaagcctatagcgagattggtatgaaaggggaacgcagaagaggcaaaggccacgacggactgtaccagggactcagcaccgccaccaaggacacctatgacgctcttcacatgcaggccctgccgcctcgg

SEQ ID NO: 43 - protein, 41 aa, Artificial Sequence
  source: /note="Description of Artificial Sequence: Synthetic polypeptide"
RSKRSRLLHSDYMNMTPRRPGPTRKHYQPYAPPRDFAAYRS

SEQ ID NO: 44 - DNA, 123 bp, Artificial Sequence; identical to SEQ ID NO: 19
  source: /note="Description of Artificial Sequence: Synthetic polynucleotide"

SEQ ID NO: 45 - protein, 35 aa, Artificial Sequence
  source: /note="Description of Artificial Sequence: Synthetic polypeptide"
TKKKYSSSVHDPNGEYMFMRAVNTAKKSRLTDVTL

SEQ ID NO: 46 - DNA, 105 bp, Artificial Sequence
  source: /note="Description of Artificial Sequence: Synthetic polynucleotide"
acaaaaaagaagtattcatccagtgtgcacgaccctaacggtgaatacatgttcatgagagcagtgaacacagccaaaaaatccagactcacagatgtgacccta

SEQ ID NO: 47 - protein, 9 aa, Artificial Sequence
  source: /note="Description of Artificial Sequence: Synthetic peptide"
QQHNKYPYT

SEQ ID NO: 48-65 - skipped (18 entries)

SEQ ID NO: 66 - DNA, 1458 bp, Artificial Sequence
  source: /note="Description of Artificial Sequence: Synthetic polynucleotide"
atggccctccctgtcaccgccctgctgcttccgctggctcttctgctccacgccgctcggccccaagtgcagctggtccagtcgggagccgaagtcaagaagcccggcgctagcgtgaaagtgtcctgcaaagcctccgggtacacattcacctcctactggatgaattgggtcagacaggcgcccggccagggactcgagtggatgggaaggattgatccttacgactccgaaacccattacaaccagaagttcaaggaccgcgtgaccatgactgtggataagtccacttccaccgcttacatggagctgtccagcctgcgctccgaggataccgcagtgtactactgcgcccggggaaactgggacgactattggggacagggaactaccgtgaccgtgtcaagcgggggtggcggtagcggaggagggggctccggcggcggcggctcagggggcggaggaagcgacgtgcagctcacccagtcgccctcatttctgtcggcctcagtgggagacagagtgaccattacttgtcgggcctccaagagcatctccaaggacctggcctggtatcagcagaagccaggaaaggcgcctaagttgctcatctactcggggtcgaccctgcaatctggcgtgccgtcccggttctccggttcgggaagcggtaccgaattcacccttactatctcctccctgcaaccggaggacttcgccacctactactgccaacagcacaacaagtacccgtacactttcgggggtggcacgaaggtcgaaatcaagaccactaccccagcaccgaggccacccaccccggctcctaccatcgcctcccagcctctgtccctgcgtccggaggcatgtagacccgcagctggtggggccgtgcatacccggggtcttgacttcgcctgcgatatctacatttgggcccctctggctggtacttgcggggtcctgctgctttcactcgtgatcactctttactgtaagcgcggtcggaagaagctgctgtacatctttaagcaacccttcatgaggcctgtgcagactactcaagaggaggacggctgttcatgccggttcccagaggaggaggaaggcggctgcgaactgcgcgtgaaattcagccgcagcgcagatgctccagcctacaagcaggggcagaaccagctctacaacgaactcaatcttggtcggagagaggagtacgacgtgctggacaagcggagaggacgggacccagaaatgggcgggaagccgcgcagaaagaatccccaagagggcctgtacaacgagctccaaaaggataagatggcagaagcctatagcgagattggtatgaaaggggaacgcagaagaggcaaaggccacgacggactgtaccagggactcagcaccgccaccaaggacacctatgacgctcttcacatgcaggccctgccgcctcgg

SEQ ID NO: 67 - DNA, 1458 bp, Artificial Sequence
  source: /note="Description of Artificial Sequence: Synthetic polynucleotide"
atggccctccctgtcaccgccctgctgcttccgctggctcttctgctccacgccgctcggccccaagtgcagctggtccagtcgggagccgaagtcaagaagcccggcgctagcgtgaaagtgtcctgcaaagcctccgggtacacattcacctcctactggatgaattgggtcagacaggcgcccggccagggactcgagtggatgggaaggattgatccttacgactccgaaacccattacaaccagaagttcaaggaccgcgtgaccatgactgtggataagtccacttccaccgcttacatggagctgtccagcctgcgctccgaggataccgcagtgtactactgcgcccggggaaactgggacgactattggggacagggaactaccgtgaccgtgtcaagcgggggtggcggtagcggaggagggggctccggcggcggcggctcagggggcggaggaagcgaagtggtgctgacccagtcgcccgcaaccctctctctgtcgccgggagaacgcgccactctttcctgtcgggcgtccaagagcatctcaaaggacctcgcctggtaccagcagaagcctggtcaagccccgcggctgctgatctactccggctccacgctgcaatcaggaatcccagccagattttccggttcggggtcggggactgacttcaccttgaccattagctcgctggaacctgaggacttcgccgtgtattactgccagcagcacaacaagtacccgtacaccttcggaggcggtactaaggtcgagatcaagaccactaccccagcaccgaggccacccaccccggctcctaccatcgcctcccagcctctgtccctgcgtccggaggcatgtagacccgcagctggtggggccgtgcatacccggggtcttgacttcgcctgcgatatctacatttgggcccctctggctggtacttgcggggtcctgctgctttcactcgtgatcactctttactgtaagcgcggtcggaagaagctgctgtacatctttaagcaacccttcatgaggcctgtgcagactactcaagaggaggacggctgttcatgccggttcccagaggaggaggaaggcggctgcgaactgcgcgtgaaattcagccgcagcgcagatgctccagcctacaagcaggggcagaaccagctctacaacgaactcaatcttggtcggagagaggagtacgacgtgctggacaagcggagaggacgggacccagaaatgggcgggaagccgcgcagaaagaatccccaagagggcctgtacaacgagctccaaaaggataagatggcagaagcctatagcgagattggtatgaaaggggaacgcagaagaggcaaaggccacgacggactgtaccagggactcagcaccgccaccaaggacacctatgacgctcttcacatgcaggccctgccgcctcgg

SEQ ID NO: 68 - DNA, 1458 bp, Artificial Sequence
  source: /note="Description of Artificial Sequence: Synthetic polynucleotide"
atggccctccctgtcaccgccctgctgcttccgctggctcttctgctccacgccgctcggccccaagtgcagctggtccagtcgggagccgaagtcaagaagcccggcgctagcgtgaaagtgtcctgcaaagcctccgggtacacattcacctcctactggatgaattgggtcagacaggcgcccggccagggactcgagtggatgggaaggattgatccttacgactccgaaacccattacaaccagaagttcaaggaccgcgtgaccatgactgtggataagtccacttccaccgcttacatggagctgtccagcctgcgctccgaggataccgcagtgtactactgcgcccggggaaactgggacgactattggggacagggaactaccgtgaccgtgtcaagcgggggtggcggtagcggaggagggggctccggcggcggcggctcagggggcggaggaagcgacgtcgtgatgacccagtcaccggcattcctgtccgtgactcccggagaaaaggtcacgattacttgccgggcgtccaagagcatctccaaggacctcgcctggtaccaacagaagccggaccaggcccctaagctgttgatctactcggggtccacccttcaatcgggagtgccatcgcggtttagcggttcgggttctgggaccgacttcactttcaccatctcctcactggaagccgaggatgccgccacttactactgtcagcagcacaacaagtatccgtacaccttcggaggcggtaccaaagtggagatcaagaccactaccccagcaccgaggccacccaccccggctcctaccatcgcctcccagcctctgtccctgcgtccggaggcatgtagacccgcagctggtggggccgtgcatacccggggtcttgacttcgcctgcgatatctacatttgggcccctctggctggtacttgcggggtcctgctgctttcactcgtgatcactctttactgtaagcgcggtcggaagaagctgctgtacatctttaagcaacccttcatgaggcctgtgcagactactcaagaggaggacggctgttcatgccggttcccagaggaggaggaaggcggctgcgaactgcgcgtgaaattcagccgcagcgcagatgctccagcctacaagcaggggcagaaccagctctacaacgaactcaatcttggtcggagagaggagtacgacgtgctggacaagcggagaggacgggacccagaaatgggcgggaagccgcgcagaaagaatccccaagagggcctgtacaacgagctccaaaaggataagatggcagaagcctatagcgagattggtatgaaaggggaacgcagaagaggcaaaggccacgacggactgtaccagggactcagcaccgccaccaaggacacctatgacgctcttcacatgcaggccctgccgcctcgg

SEQ ID NO: 69 - DNA, 1458 bp, Artificial Sequence
  source: /note="Description of Artificial Sequence: Synthetic polynucleotide"
atggccctccctgtcaccgccctgctgcttccgctggctcttctgctccacgccgctcggccccaagtgcagctggtccagtcgggagccgaagtcaagaagcccggcgctagcgtgaaagtgtcctgcaaagcctccgggtacacattcacctcctactggatgaattgggtcagacaggcgcccggccagggactcgagtggatgggaaggattgatccttacgactccgaaacccattacaaccagaagttcaaggaccgcgtgaccatgactgtggataagtccacttccaccgcttacatggagctgtccagcctgcgctccgaggataccgcagtgtactactgcgcccggggaaactgggacgactattggggacagggaactaccgtgaccgtgtcaagcgggggtggcggtagcggaggagggggctccggcggcggcggctcagggggcggaggaagcgacgtggtcatgactcagtccccggactcactcgcggtgtcgcttggagagagagcgaccatcaactgtcgggcctcaaagagcatcagcaaggacctggcctggtaccagcagaagccgggacagccgccaaagctgctgatctactccgggtccaccttgcaatctggtgtccctgaccggttctccggttccgggtcgggtaccgacttcacgctcactatttcgtcgctgcaagccgaagatgtggccgtgtactattgccaacagcacaacaagtacccctacacttttggcggaggcaccaaggtggaaatcaagaccactaccccagcaccgaggccacccaccccggctcctaccatcgcctcccagcctctgtccctgcgtccggaggcatgtagacccgcagctggtggggccgtgcatacccggggtcttgacttcgcctgcgatatctacatttgggcccctctggctggtacttgcggggtcctgctgctttcactcgtgatcactctttactgtaagcgcggtcggaagaagctgctgtacatctttaagcaacccttcatgaggcctgtgcagactactcaagaggaggacggctgttcatgccggttcccagaggaggaggaaggcggctgcgaactgcgcgtgaaattcagccgcagcgcagatgctccagcctacaagcaggggcagaaccagctctacaacgaactcaatcttggtcggagagaggagtacgacgtgctggacaagcggagaggacgggacccagaaatgggcgggaagccgcgcagaaagaatccccaagagggcctgtacaacgagctccaaaaggataagatggcagaagcctatagcgagattggtatgaaaggggaacgcagaagaggcaaaggccacgacggactgtaccagggactcagcaccgccaccaaggacacctatgacgctcttcacatgcaggccctgccgcctcgg

SEQ ID NO: 70 - DNA, 1458 bp, Artificial Sequence
  source: /note="Description of Artificial Sequence: Synthetic polynucleotide"
atggccctccctgtcaccgccctgctgcttccgctggctcttctgctccacgccgctcggcccgacgtgcagctcacccagtcgccctcatttctgtcggcctcagtgggagacagagtgaccattacttgtcgggcctccaagagcatctccaaggacctggcctggtatcagcagaagccaggaaaggcgcctaagttgctcatctactcggggtcgaccctgcaatctggcgtgccgtcccggttctccggttcgggaagcggtaccgaattcacccttactatctcctccctgcaaccggaggacttcgccacctactactgccaacagcacaacaagtacccgtacactttcgggggtggcacgaaggtcgaaatcaaggggggtggcggtagcggaggagggggctccggcggcggcggctcagggggcggaggaagccaagtgcagctggtccagtcgggagccgaagtcaagaagcccggcgctagcgtgaaagtgtcctgcaaagcctccgggtacacattcacctcctactggatgaattgggtcagacaggcgcccggccagggactcgagtggatgggaaggattgatccttacgactccgaaacccattacaaccagaagttcaaggaccgcgtgaccatgactgtggataagtccacttccaccgcttacatggagctgtccagcctgcgctccgaggataccgcagtgtactactgcgcccggggaaactgggacgactattggggacagggaactaccgtgaccgtgtcaagcaccactaccccagcaccgaggccacccaccccggctcctaccatcgcctcccagcctctgtccctgcgtccggaggcatgtagacccgcagctggtggggccgtgcatacccggggtcttgacttcgcctgcgatatctacatttgggcccctctggctggtacttgcggggtcctgctgctttcactcgtgatcactctttactgtaagcgcggtcggaagaagctgctgtacatctttaagcaacccttcatgaggcctgtgcagactactcaagaggaggacggctgttcatgccggttcccagaggaggaggaaggcggctgcgaactgcgcgtgaaattcagccgcagcgcagatgctccagcctacaagcaggggcagaaccagctctacaacgaactcaatcttggtcggagagaggagtacgacgtgctggacaagcggagaggacgggacccagaaatgggcgggaagccgcgcagaaagaatccccaagagggcctgtacaacgagctccaaaaggataagatggcagaagcctatagcgagattggtatgaaaggggaacgcagaagaggcaaaggccacgacggactgtaccagggactcagcaccgccaccaaggacacctatgacgctcttcacatgcaggccctgccgcctcgg

SEQ ID NO: 71 - DNA, 1458 bp, Artificial Sequence
  source: /note="Description of Artificial Sequence: Synthetic polynucleotide"
atggccctccctgtcaccgccctgctgcttccgctggctcttctgctccacgccgctcggcccgaagtggtgctgacccagtcgcccgcaaccctctctctgtcgccgggagaacgcgccactctttcctgtcgggcgtccaagagcatctcaaaggacctcgcctggtaccagcagaagcctggtcaagccccgcggctgctgatctactccggctccacgctgcaatcaggaatcccagccagattttccggttcggggtcggggactgacttcaccttgaccattagctcgctggaacctgaggacttcgccgtgtattactgccagcagcacaacaagtacccgtacaccttcggaggcggtactaaggtcgagatcaaggggggtggcggtagcggaggagggggctccggcggcggcggctcagggggcggaggaagccaagtgcagctggtccagtcgggagccgaagtcaagaagcccggcgctagcgtgaaagtgtcctgcaaagcctccgggtacacattcacctcctactggatgaattgggtcagacaggcgcccggccagggactcgagtggatgggaaggattgatccttacgactccgaaacccattacaaccagaagttcaaggaccgcgtgaccatgactgtggataagtccacttccaccgcttacatggagctgtccagcctgcgctccgaggataccgcagtgtactactgcgcccggggaaactgggacgactattggggacagggaactaccgtgaccgtgtcaagcaccactaccccagcaccgaggccacccaccccggctcctaccatcgcctcccagcctctgtccctgcgtccggaggcatgtagacccgcagctggtggggccgtgcatacccggggtcttgacttcgcctgcgatatctacatttgggcccctctggctggtacttgcggggtcctgctgctttcactcgtgatcactctttactgtaagcgcggtcggaagaagctgctgtacatctttaagcaacccttcatgaggcctgtgcagactactcaagaggaggacggctgttcatgccggttcccagaggaggaggaaggcggctgcgaactgcgcgtgaaattcagccgcagcgcagatgctccagcctacaagcaggggcagaaccagctctacaacgaactcaatcttggtcggagagaggagtacgacgtgctggacaagcggagaggacgggacccagaaatgggcgggaagccgcgcagaaagaatccccaagagggcctgtacaacgagctccaaaaggataagatggcagaagcctatagcgagattggtatgaaaggggaacgcagaagaggcaaaggccacgacggactgtaccagggactcagcaccgccaccaaggacacctatgacgctcttcacatgcaggccctgccgcctcgg

SEQ ID NO: 72 - DNA, 1458 bp, Artificial Sequence
  source: /note="Description of Artificial Sequence: Synthetic polynucleotide"
atggccctccctgtcaccgccctgctgcttccgctggctcttctgctccacgccgctcggcccgacgtcgtgatgacccagtcaccggcattcctgtccgtgactcccggagaaaaggtcacgattacttgccgggcgtccaagagcatctccaaggacctcgcctggtaccaacagaagccggaccaggcccctaagctgttgatctactcggggtccacccttcaatcgggagtgccatcgcggtttagcggttcgggttctgggaccgacttcactttcaccatctcctcactggaagccgaggatgccgccacttactactgtcagcagcacaacaagtatccgtacaccttcggaggcggtaccaaagtggagatcaaggggggtggcggtagcggaggagggggctccggcggcggcggctcagggggcggaggaagccaagtgcagctggtccagtcgggagccgaagtcaagaagcccggcgctagcgtgaaagtgtcctgcaaagcctccgggtacacattcacctcctactggatgaattgggtcagacaggcgcccggccagggactcgagtggatgggaaggattgatccttacgactccgaaacccattacaaccagaagttcaaggaccgcgtgaccatgactgtggataagtccacttccaccgcttacatggagctgtccagcctgcgctccgaggataccgcagtgtactactgcgcccggggaaactgggacgactattggggacagggaactaccgtgaccgtgtcaagcaccactaccccagcaccgaggccacccaccccggctcctaccatcgcctcccagcctctgtccctgcgtccggaggcatgtagacccgcagctggtggggccgtgcatacccggggtcttgacttcgcctgcgatatctacatttgggcccctctggctggtacttgcggggtcctgctgctttcactcgtgatcactctttactgtaagcgcggtcggaagaagctgctgtacatctttaagcaacccttcatgaggcctgtgcagactactcaagaggaggacggctgttcatgccggttcccagaggaggaggaaggcggctgcgaactgcgcgtgaaattcagccgcagcgcagatgctccagcctacaagcaggggcagaaccagctctacaacgaactcaatcttggtcggagagaggagtacgacgtgctggacaagcggagaggacgggacccagaaatgggcgggaagccgcgcagaaagaatccccaagagggcctgtacaacgagctccaaaaggataagatggcagaagcctatagcgagattggtatgaaaggggaacgcagaagaggcaaaggccacgacggactgtaccagggactcagcaccgccaccaaggacacctatgacgctcttcacatgcaggccctgccgcctcgg

SEQ ID NO: 73 - DNA, 1458 bp, Artificial Sequence
  source: /note="Description of Artificial Sequence: Synthetic polynucleotide"
atggccctccctgtcaccgccctgctgcttccgctggctcttctgctccacgccgctcggcccgacgtggtcatgactcagtccccggactcactcgcggtgtcgcttggagagagagcgaccatcaactgtcgggcctcaaagagcatcagcaaggacctggcctggtaccagcagaagccgggacagccgccaaagctgctgatctactccgggtccaccttgcaatctggtgtccctgaccggttctccggttccgggtcgggtaccgacttcacgctcactatttcgtcgctgcaagccgaagatgtggccgtgtactattgccaacagcacaacaagtacccctacacttttggcggaggcaccaaggtggaaatcaaggggggtggcggtagcggaggagggggctccggcggcggcggctcagggggcggaggaagccaagtgcagctggtccagtcgggagccgaagtcaagaagcccggcgctagcgtgaaagtgtcctgcaaagcctccgggtacacattcacctcctactggatgaattgggtcagacaggcgcccggccagggactcgagtggatgggaaggattgatccttacgactccgaaacccattacaaccagaagttcaaggaccgcgtgaccatgactgtggataagtccacttccaccgcttacatggagctgtccagcctgcgctccgaggataccgcagtgtactactgcgcccggggaaactgggacgactattggggacagggaactaccgtgaccgtgtcaagcaccactaccccagcaccgaggccacccaccccggctcctaccatcgcctcccagcctctgtccctgcgtccggaggcatgtagacccgcagctggtggggccgtgcatacccggggtcttgacttcgcctgcgatatctacatttgggcccctctggctggtacttgcggggtcctgctgctttcactcgtgatcactctttactgtaagcgcggtcggaagaagctgctgtacatctttaagcaacccttcatgaggcctgtgcagactactcaagaggaggacggctgttcatgccggttcccagaggaggaggaaggcggctgcgaactgcgcgtgaaattcagccgcagcgcagatgctccagcctacaagcaggggcagaaccagctctacaacgaactcaatcttggtcggagagaggagtacgacgtgctggacaagcggagaggacgggacccagaaatgggcgggaagccgcgcagaaagaatccccaagagggcctgtacaacgagctccaaaaggataagatggcagaagcctatagcgagattggtatgaaaggggaacgcagaagaggcaaaggccacgacggactgtaccagggactcagcaccgccaccaaggacacctatgacgctcttcacatgcaggccctgccgcctcgg

SEQ ID NO: 74 - DNA, 1458 bp, Artificial Sequence
  source: /note="Description of Artificial Sequence: Synthetic polynucleotide"
atggccctccctgtcaccgccctgctgcttccgctggctcttctgctccacgccgctcggccccaagtgcagctggtgcagtcaggcagcgaactgaagaagcccggagcctccgtcaaagtgtcctgcaaagcctcgggatacaccttcacctcctactggatgaactgggtccgccaggcacctggacaggggctggagtggatgggaaggatcgatccctacgattccgaaacccattacaatcagaagttcaaggaccggtttgtgttctccgtggacaagtccgtgtccaccgcctacctccaaattagcagcctgaaggcggaggatacagctgtctactactgcgctcgcggaaactgggatgactattggggccagggaactaccgtgactgtgtcctccgggggtggcggtagcggaggagggggctccggcggcggcggctcagggggcggaggaagcgacgtgcagctcacccagtcgccctcatttctgtcggcctcagtgggagacagagtgaccattacttgtcgggcctccaagagcatctccaaggacctggcctggtatcagcagaagccaggaaaggcgcctaagttgctcatctactcggggtcgaccctgcaatctggcgtgccgtcccggttctccggttcgggaagcggtaccgaattcacccttactatctcctccctgcaaccggaggacttcgccacctactactgccaacagcacaacaagtacccgtacactttcgggggtggcacgaaggtcgaaatcaagaccactaccccagcaccgaggccacccaccccggctcctaccatcgcctcccagcctctgtccctgcgtccggaggcatgtagacccgcagctggtggggccgtgcatacccggggtcttgacttcgcctgcgatatctacatttgggcccctctggctggtacttgcggggtcctgctgctttcactcgtgatcactctttactgtaagcgcggtcggaagaagctgctgtacatctttaagcaacccttcatgaggcctgtgcagactactcaagaggaggacggctgttcatgccggttcccagaggaggaggaaggcggctgcgaactgcgcgtgaaattcagccgcagcgcagatgctccagcctacaagcaggggcagaaccagctctacaacgaactcaatcttggtcggagagaggagtacgacgtgctggacaagcggagaggacgggacccagaaatgggcgggaagccgcgcagaaagaatccccaagagggcctgtacaacgagctccaaaaggataagatggcagaagcctatagcgagattggtatgaaaggggaacgcagaagaggcaaaggccacgacggactgtaccagggactcagcaccgccaccaaggacacctatgacgctcttcacatgcaggccctgccgcctcgg

SEQ ID NO: 75 - DNA, 1458 bp, Artificial Sequence
  source: /note="Description of Artificial Sequence: Synthetic polynucleotide"
atggccctccctgtcaccgccctgctgcttccgctggctcttctgctccacgccgctcggccccaagtgcagctggtgcagtcaggcagcgaactgaagaagcccggagcctccgtcaaagtgtcctgcaaagcctcgggatacaccttcacctcctactggatgaactgggtccgccaggcacctggacaggggctggagtggatgggaaggatcgatccctacgattccgaaacccattacaatcagaagttcaaggaccggtttgtgttctccgtggacaagtccgtgtccaccgcctacctccaaattagcagcctgaaggcggaggatacagctgtctactactgcgctcgcggaaactgggatgactattggggccagggaactaccgtgactgtgtcctccgggggtggcggtagcggaggagggggctccggcggcggcggctcagggggcggaggaagcgaagtggtgctgacccagtcgcccgcaaccctctctctgtcgccgggagaacgcgccactctttcctgtcgggcgtccaagagcatctcaaaggacctcgcctggtaccagcagaagcctggtcaagccccgcggctgctgatctactccggctccacgctgcaatcaggaatcccagccagattttccggttcggggtcggggactgacttcaccttgaccattagctcgctggaacctgaggacttcgccgtgtattactgccagcagcacaacaagtacccgtacaccttcggaggcggtactaaggtcgagatcaagaccactaccccagcaccgaggccacccaccccggctcctaccatcgcctcccagcctctgtccctgcgtccggaggcatgtagacccgcagctggtggggccgtgcatacccggggtcttgacttcgcctgcgatatctacatttgggcccctctggctggtacttgcggggtcctgctgctttcactcgtgatcactctttactgtaagcgcggtcggaagaagctgctgtacatctttaagcaacccttcatgaggcctgtgcagactactcaagaggaggacggctgttcatgccggttcccagaggaggaggaaggcggctgcgaactgcgcgtgaaattcagccgcagcgcagatgctccagcctacaagcaggggcagaaccagctctacaacgaactcaatcttggtcggagagaggagtacgacgtgctggacaagcggagaggacgggacccagaaatgggcgggaagccgcgcagaaagaatccccaagagggcctgtacaacgagctccaaaaggataagatggcagaagcctatagcgagattggtatgaaaggggaacgcagaagaggcaaaggccacgacggactgtaccagggactcagcaccgccaccaaggacacctatgacgctcttcacatgcaggccctgccgcctcgg

SEQ ID NO: 76 - DNA, 1458 bp, Artificial Sequence
  source: /note="Description of Artificial Sequence: Synthetic polynucleotide"
atggccctccctgtcaccgccctgctgcttccgctggctcttctgctccacgccgctcggccccaagtgcagctggtgcagtcaggcagcgaactgaagaagcccggagcctccgtcaaagtgtcctgcaaagcctcgggatacaccttcacctcctactggatgaactgggtccgccaggcacctggacaggggctggagtggatgggaaggatcgatccctacgattccgaaacccattacaatcagaagttcaaggaccggtttgtgttctccgtggacaagtccgtgtccaccgcctacctccaaattagcagcctgaaggcggaggatacagctgtctactactgcgctcgcggaaactgggatgactattggggccagggaactaccgtgactgtgtcctccgggggtggcggtagcggaggagggggctccggcggcggcggctcagggggcggaggaagcgacgtcgtgatgacccagtcaccggcattcctgtccgtgactcccggagaaaaggtcacgattacttgccgggcgtccaagagcatctccaaggacctcgcctggtaccaacagaagccggaccaggcccctaagctgttgatctactcggggtccacccttcaatcgggagtgccatcgcggtttagcggttcgggttctgggaccgacttcactttcaccatctcctcactggaagccgaggatgccgccacttactactgtcagcagcacaacaagtatccgtacaccttcggaggcggtaccaaagtggagatcaagaccactaccccagcaccgaggccacccaccccggctcctaccatcgcctcccagcctctgtccctgcgtccggaggcatgtagacccgcagctggtggggccgtgcatacccggggtcttgacttcgcctgcgatatctacatttgggcccctctggctggtacttgcggggtcctgctgctttcactcgtgatcactctttactgtaagcgcggtcggaagaagctgctgtacatctttaagcaacccttcatgaggcctgtgcagactactcaagaggaggacggctgttcatgccggttcccagaggaggaggaaggcggctgcgaactgcgcgtgaaattcagccgcagcgcagatgctccagcctacaagcaggggcagaaccagctctacaacgaactcaatcttggtcggagagaggagtacgacgtgctggacaagcggagaggacgggacccagaaatgggcgggaagccgcgcagaaagaatccccaagagggcctgtacaacgagctccaaaaggataagatggcagaagcctatagcgagattggtatgaaaggggaacgcagaagaggcaaaggccacgacggactgtaccagggactcagcaccgccaccaaggacacctatgacgctcttcacatgcaggccctgccgcctcgg

SEQ ID NO: 77 - DNA, 1458 bp, Artificial Sequence
  source: /note="Description of Artificial Sequence: Synthetic polynucleotide"
atggccctccctgtcaccgccctgctgcttccgctggctcttctgctccacgccgctcggccccaagtgcagctggtgcagtcaggcagcgaactgaagaagcccggagcctccgtcaaagtgtcctgcaaagcctcgggatacaccttcacctcctactggatgaactgggtccgccaggcacctggacaggggctggagtggatgggaaggatcgatccctacgattccgaaacccattacaatcagaagttcaaggaccggtttgtgttctccgtggacaagtccgtgtccaccgcctacctccaaattagcagcctgaaggcggaggatacagctgtctactactgcgctcgcggaaactgggatgactattggggccagggaactaccgtgactgtgtcctccgggggtggcggtagcggaggagggggctccggcggcggcggctcagggggcggaggaagcgacgtggtcatgactcagtccccggactcactcgcggtgtcgcttggagagagagcgaccatcaactgtcgggcctcaaagagcatcagcaaggacctggcctggtaccagcagaagccgggacagccgccaaagctgctgatctactccgggtccaccttgcaatctggtgtccctgaccggttctccggttccgggtcgggtaccgacttcacgctcactatttcgtcgctgcaagccgaagatgtggccgtgtactattgccaacagcacaacaagtacccctacacttttggcggaggcaccaaggtggaaatcaagaccactaccccagcaccgaggccacccaccccggctcctaccatcgcctcccagcctctgtccctgcgtccggaggcatgtagacccgcagctggtggggccgtgcatacccggggtcttgacttcgcctgcgatatctacatttgggcccctctggctggtacttgcggggtcctgctgctttcactcgtgatcactctttactgtaagcgcggtcggaagaagctgctgtacatctttaagcaacccttcatgaggcctgtgcagactactcaagaggaggacggctgttcatgccggttcccagaggaggaggaaggcggctgcgaactgcgcgtgaaattcagccgcagcgcagatgctccagcctacaagcaggggcagaaccagctctacaacgaactcaatcttggtcggagagaggagtacgacgtgctggacaagcggagaggacgggacccagaaatgggcgggaagccgcgcagaaagaatccccaagagggcctgtacaacgagctccaaaaggataagatggcagaagcctatagcgagattggtatgaaaggggaacgcagaagaggcaaaggccacgacggactgtaccagggactcagcaccgccaccaaggacacctatgacgctcttcacatgcaggccctgccgcctcgg

SEQ ID NO: 78 - DNA, 1458 bp, Artificial Sequence
  source: /note="Description of Artificial Sequence: Synthetic polynucleotide"
atggccctccctgtcaccgccctgctgcttccgctggctcttctgctccacgccgctcggcccgacgtgcagctcacccagtcgccctcatttctgtcggcctcagtgggagacagagtgaccattacttgtcgggcctccaagagcatctccaaggacctggcctggtatcagcagaagccaggaaaggcgcctaagttgctcatctactcggggtcgaccctgcaatctggcgtgccgtcccggttctccggttcgggaagcggtaccgaattcacccttactatctcctccctgcaaccggaggacttcgccacctactactgccaacagcacaacaagtacccgtacactttcgggggtggcacgaaggtcgaaatcaaggggggtggcggtagcggaggagggggctccggcggcggcggctcagggggcggaggaagccaagtgcagctggtgcagtcaggcagcgaactgaagaagcccggagcctccgtcaaagtgtcctgcaaagcctcgggatacaccttcacctcctactggatgaactgggtccgccaggcacctggacaggggctggagtggatgggaaggatcgatccctacgattccgaaacccattacaatcagaagttcaaggaccggtttgtgttctccgtggacaagtccgtgtccaccgcctacctccaaattagcagcctgaaggcggaggatacagctgtctactactgcgctcgcggaaactgggatgactattggggccagggaactaccgtgactgtgtcctccaccactaccccagcaccgaggccacccaccccggctcctaccatcgcctcccagcctctgtccctgcgtccggaggcatgtagacccgcagctggtggggccgtgcatacccggggtcttgacttcgcctgcgatatctacatttgggcccctctggctggtacttgcggggtcctgctgctttcactcgtgatcactctttactgtaagcgcggtcggaagaagctgctgtacatctttaagcaacccttcatgaggcctgtgcagactactcaagaggaggacggctgttcatgccggttcccagaggaggaggaaggcggctgcgaactgcgcgtgaaattcagccgcagcgcagatgctccagcctacaagcaggggcagaaccagctctacaacgaactcaatcttggtcggagagaggagtacgacgtgctggacaagcggagaggacgggacccagaaatgggcgggaagccgcgcagaaagaatccccaagagggcctgtacaacgagctccaaaaggataagatggcagaagcctatagcgagattggtatgaaaggggaacgcagaagaggcaaaggccacgacggactgtaccagggactcagcaccgccaccaaggacacctatgacgctcttcacatgcaggccctgccgcctcgg

SEQ ID NO: 79 - DNA, 1458 bp, Artificial Sequence
  source: /note="Description of Artificial Sequence: Synthetic polynucleotide"
atggccctccctgtcaccgccctgctgcttccgctggctcttctgctccacgccgctcggcccgaagtggtgctgacccagtcgcccgcaaccctctctctgtcgccgggagaacgcgccactctttcctgtcgggcgtccaagagcatctcaaaggacctcgcctggtaccagcagaagcctggtcaagccccgcggctgctgatctactccggctccacgctgcaatcaggaatcccagccagattttccggttcggggtcggggactgacttcaccttgaccattagctcgctggaacctgaggacttcgccgtgtattactgccagcagcacaacaagtacccgtacaccttcggaggcggtactaaggtcgagatcaaggggggtggcggtagcggaggagggggctccggcggcggcggctcagggggcggaggaagccaagtgcagctggtgcagtcaggcagcgaactgaagaagcccggagcctccgtcaaagtgtcctgcaaagcctcgggatacaccttcacctcctactggatgaactgggtccgccaggcacctggacaggggctggagtggatgggaaggatcgatccctacgattccgaaacccattacaatcagaagttcaaggaccggtttgtgttctccgtggacaagtccgtgtccaccgcctacctccaaattagcagcctgaaggcggaggatacagctgtctactactgcgctcgcggaaactgggatgactattggggccagggaactaccgtgactgtgtcctccaccactaccccagcaccgaggccacccaccccggctcctaccatcgcctcccagcctctgtccctgcgtccggaggcatgtagacccgcagctggtggggccgtgcatacccggggtcttgacttcgcctgcgatatctacatttgggcccctctggctggtacttgcggggtcctgctgctttcactcgtgatcactctttactgtaagcgcggtcggaagaagctgctgtacatctttaagcaacccttcatgaggcctgtgcagactactcaagaggaggacggctgttcatgccggttcccagaggaggaggaaggcggctgcgaactgcgcgtgaaattcagccgcagcgcagatgctccagcctacaagcaggggcagaaccagctctacaacgaactcaatcttggtcggagagaggagtacgacgtgctggacaagcggagaggacgggacccagaaatgggcgggaagccgcgcagaaagaatccccaagagggcctgtacaacgagctccaaaaggataagatggcagaagcctatagcgagattggtatgaaaggggaacgcagaagaggcaaaggccacgacggactgtaccagggactcagcaccgccaccaaggacacctatgacgctcttcacatgcaggccctgccgcctcgg

SEQ ID NO: 80 - DNA, 1458 bp, Artificial Sequence
  source: /note="Description of Artificial Sequence: Synthetic polynucleotide"
atggccctccctgtcaccgccctgctgcttccgctggctcttctgctccacgccgctcggcccgacgtcgtgatgacccagtcaccggcattcctgtccgtgactcccggagaaaaggtcacgattacttgccgggcgtccaagagcatctccaaggacctcgcctggtaccaacagaagccggaccaggcccctaagctgttgatctactcggggtccacccttcaatcgggagtgccatcgcggtttagcggttcgggttctgggaccgacttcactttcaccatctcctcactggaagccgaggatgccgccacttactactgtcagcagcacaacaagtatccgtacaccttcggaggcggtaccaaagtggagatcaaggggggtggcggtagcggaggagggggctccggcggcggcggctcagggggcggaggaagccaagtgcagctggtgcagtcaggcagcgaactgaagaagcccggagcctccgtcaaagtgtcctgcaaagcctcgggatacaccttcacctcctactggatgaactgggtccgccaggcacctggacaggggctggagtggatgggaaggatcgatccctacgattccgaaacccattacaatcagaagttcaaggaccggtttgtgttctccgtggacaagtccgtgtccaccgcctacctccaaattagcagcctgaaggcggaggatacagctgtctactactgcgctcgcggaaactgggatgactattggggccagggaactaccgtgactgtgtcctccaccactaccccagcaccgaggccacccaccccggctcctaccatcgcctcccagcctctgtccctgcgtccggaggcatgtagacccgcagctggtggggccgtgcatacccggggtcttgacttcgcctgcgatatctacatttgggcccctctggctggtacttgcggggtcctgctgctttcactcgtgatcactctttactgtaagcgcggtcggaagaagctgctgtacatctttaagcaacccttcatgaggcctgtgcagactactcaagaggaggacggctgttcatgccggttcccagaggaggaggaaggcggctgcgaactgcgcgtgaaattcagccgcagcgcagatgctccagcctacaagcaggggcagaaccagctctacaacgaactcaatcttggtcggagagaggagtacgacgtgctggacaagcggagaggacgggacccagaaatgggcgggaagccgcgcagaaagaatccccaagagggcctgtacaacgagctccaaaaggataagatggcagaagcctatagcgagattggtatgaaaggggaacgcagaagaggcaaaggccacgacggactgtaccagggactcagcaccgccaccaaggacacctatgacgctcttcacatgcaggccctgccgcctcgg

SEQ ID NO: 81 - DNA, 1458 bp, Artificial Sequence
  source: /note="Description of Artificial Sequence: Synthetic polynucleotide"
atggccctccctgtcaccgccctgctgcttccgctggctcttctgctccacgccgctcggcccgacgtggtcatgactcagtccccggactcactcgcggtgtcgcttggagagagagcgaccatcaactgtcgggcctcaaagagcatcagcaaggacctggcctggtaccagcagaagccgggacagccgccaaagctgctgatctactccgggtccaccttgcaatctggtgtccctgaccggttctccggttccgggtcgggtaccgacttcacgctcactatttcgtcgctgcaagccgaagatgtggccgtgtactattgccaacagcacaacaagtacccctacacttttggcggaggcaccaaggtggaaatcaaggggggtggcggtagcggaggagggggctccggcggcggcggctcagggggcggaggaagccaagtgcagctggtgcagtcaggcagcgaactgaagaagcccggagcctccgtcaaagtgtcctgcaaagcctcgggatacaccttcacctcctactggatgaactgggtccgccaggcacctggacaggggctggagtggatgggaaggatcgatccctacgattccgaaacccattacaatcagaagttcaaggaccggtttgtgttctccgtggacaagtccgtgtccaccgcctacctccaaattagcagcctgaaggcggaggatacagctgtctactactgcgctcgcggaaactgggatgactattggggccagggaactaccgtgactgtgtcctccaccactaccccagcaccgaggccacccaccccggctcctaccatcgcctcccagcctctgtccctgcgtccggaggcatgtagacccgcagctggtggggccgtgcatacccggggtcttgacttcgcctgcgatatctacatttgggcccctctggctggtacttgcggggtcctgctgctttcactcgtgatcactctttactgtaagcgcggtcggaagaagctgctgtacatctttaagcaacccttcatgaggcctgtgcagactactcaagaggaggacggctgttcatgccggttcccagaggaggaggaaggcggctgcgaactgcgcgtgaaattcagccgcagcgcagatgctccagcctacaagcaggggcagaaccagctctacaacgaactcaatcttggtcggagagaggagtacgacgtgctggacaagcggagaggacgggacccagaaatgggcgggaagccgcgcagaaagaatccccaagagggcctgtacaacgagctccaaaaggataagatggcagaagcctatagcgagattggtatgaaaggggaacgcagaagaggcaaaggccacgacggactgtaccagggactcagcaccgccaccaaggacacctatgacgctcttcacatgcaggccctgccgcctcgg

SEQ ID NO: 82 - DNA, 1458 bp, Artificial Sequence
  source: /note="Description of Artificial Sequence: Synthetic polynucleotide"
atggccctccctgtcaccgccctgctgcttccgctggctcttctgctccacgccgctcggcccgaggtgcagctggtgcagagcggagccgaggtcaagaagcctggagaatccctgaggatcagctgcaaaggcagcgggtataccttcacctcctactggatgaattgggtccgccagatgcccggaaaaggcctggagtggatgggacggattgacccctacgactcggaaacccattacaaccagaagttcaaggatcacgtgaccatctccgtggacaagtccatttccactgcgtacctccagtggtcaagcctgaaggcctccgacactgctatgtactactgcgcacgcggaaactgggatgattactggggacagggaacaaccgtgactgtgtcctccgggggtggcggtagcggaggagggggctccggcggcggcggctcagggggcggaggaagcgacgtgcagctcacccagtcgccctcatttctgtcggcctcagtgggagacagagtgaccattacttgtcgggcctccaagagcatctccaaggacctggcctggtatcagcagaagccaggaaaggcgcctaagttgctcatctactcggggtcgaccctgcaatctggcgtgccgtcccggttctccggttcgggaagcggtaccgaattcacccttactatctcctccctgcaaccggaggacttcgccacctactactgccaacagcacaacaagtacccgtacactttcgggggtggcacgaaggtcgaaatcaagaccactaccccagcaccgaggccacccaccccggctcctaccatcgcctcccagcctctgtccctgcgtccggaggcatgtagacccgcagctggtggggccgtgcatacccggggtcttgacttcgcctgcgatatctacatttgggcccctctggctggtacttgcggggtcctgctgctttcactcgtgatcactctttactgtaagcgcggtcggaagaagctgctgtacatctttaagcaacccttcatgaggcctgtgcagactactcaagaggaggacggctgttcatgccggttcccagaggaggaggaaggcggctgcgaactgcgcgtgaaattcagccgcagcgcagatgctccagcctacaagcaggggcagaaccagctctacaacgaactcaatcttggtcggagagaggagtacgacgtgctggacaagcggagaggacgggacccagaaatgggcgggaagccgcgcagaaagaatccccaagagggcctgtacaacgagctccaaaaggataagatggcagaagcctatagcgagattggtatgaaaggggaacgcagaagaggcaaaggccacgacggactgtaccagggactcagcaccgccaccaaggacacctatgacgctcttcacatgcaggccctgccgcctcgg

SEQ ID NO: 83 - DNA, 1458 bp, Artificial Sequence
  source: /note="Description of Artificial Sequence: Synthetic polynucleotide"
atggccctccctgtcaccgccctgctgcttccgctggctcttctgctccacgccgctcggcccgaggtgcagctggtgcagagcggagccgaggtcaagaagcctggagaatccctgaggatcagctgcaaaggcagcgggtataccttcacctcctactggatgaattgggtccgccagatgcccggaaaaggcctggagtggatgggacggattgacccctacgactcggaaacccattacaaccagaagttcaaggatcacgtgaccatctccgtggacaagtccatttccactgcgtacctccagtggtcaagcctgaaggcctccgacactgctatgtactactgcgcacgcggaaactgggatgattactggggacagggaacaaccgtgactgtgtcctccgggggtggcggtagcggaggagggggctccggcggcggcggctcagggggcggaggaagcgaagtggtgctgacccagtcgcccgcaaccctctctctgtcgccgggagaacgcgccactctttcctgtcgggcgtccaagagcatctcaaaggacctcgcctggtaccagcagaagcctggtcaagccccgcggctgctgatctactccggctccacgctgcaatcaggaatcccagccagattttccggttcggggtcggggactgacttcaccttgaccattagctcgctggaacctgaggacttcgccgtgtattactgccagcagcacaacaagtacccgtacaccttcggaggcggtactaaggtcgagatcaagaccactaccccagcaccgaggccacccaccccggctcctaccatcgcctcccagcctctgtccctgcgtccggaggcatgtagacccgcagctggtggggccgtgcatacccggggtcttgacttcgcctgcgatatctacatttgggcccctctggctggtacttgcggggtcctgctgctttcactcgtgatcactctttactgtaagcgcggtcggaagaagctgctgtacatctttaagcaacccttcatgaggcctgtgcagactactcaagaggaggacggctgttcatgccggttcccagaggaggaggaaggcggctgcgaactgcgcgtgaaattcagccgcagcgcagatgctccagcctacaagcaggggcagaaccagctctacaacgaactcaatcttggtcggagagaggagtacgacgtgctggacaagcggagaggacgggacccagaaatgggcgggaagccgcgcagaaagaatccccaagagggcctgtacaacgagctccaaaaggataagatggcagaagcctatagcgagattggtatgaaaggggaacgcagaagaggcaaaggccacgacggactgtaccagggactcagcaccgccaccaaggacacctatgacgctcttcacatgcaggccctgccgcctcgg

SEQ ID NO: 84 - DNA, 1458 bp, Artificial Sequence
  source: /note="Description of Artificial Sequence: Synthetic polynucleotide"
atggccctccctgtcaccgccctgctgcttccgctggctcttctgctccacgccgctcggcccgaggtgcagctggtgcagagcggagccgaggtcaagaagcctggagaatccctgaggatcagctgcaaaggcagcgggtataccttcacctcctactggatgaattgggtccgccagatgcccggaaaaggcctggagtggatgggacggattgacccctacgactcggaaacccattacaaccagaagttcaaggatcacgtgaccatctccgtggacaagtccatttccactgcgtacctccagtggtcaagcctgaaggcctccgacactgctatgtactactgcgcacgcggaaactgggatgattactggggacagggaacaaccgtgactgtgtcctccgggggtggcggtagcggaggagggggctccggcggcggcggctcagggggcggaggaagcgacgtcgtgatgacccagtcaccggcattcctgtccgtgactcccggagaaaaggtcacgattacttgccgggcgtccaagagcatctccaaggacctcgcctggtaccaacagaagccggaccaggcccctaagctgttgatctactcggggtccacccttcaatcgggagtgccatcgcggtttagcggttcgggttctgggaccgacttcactttcaccatctcctcactggaagccgaggatgccgccacttactactgtcagcagcacaacaagtatccgtacaccttcggaggcggtaccaaagtggagatcaagaccactaccccagcaccgaggccacccaccccggctcctaccatcgcctcccagcctctgtccctgcgtccggaggcatgtagacccgcagctggtggggccgtgcatacccggggtcttgacttcgcctgcgatatctacatttgggcccctctggctggtacttgcggggtcctgctgctttcactcgtgatcactctttactgtaagcgcggtcggaagaagctgctgtacatctttaagcaacccttcatgaggcctgtgcagactactcaagaggaggacggctgttcatgccggttcccagaggaggaggaaggcggctgcgaactgcgcgtgaaattcagccgcagcgcagatgctccagcctacaagcaggggcagaaccagctctacaacgaactcaatcttggtcggagagaggagtacgacgtgctggacaagcggagaggacgggacccagaaatgggcgggaagccgcgcagaaagaatccccaagagggcctgtacaacgagctccaaaaggataagatggcagaagcctatagcgagattggtatgaaaggggaacgcagaagaggcaaaggccacgacggactgtaccagggactcagcaccgccaccaaggacacctatgacgctcttcacatgcaggccctgccgcctcgg

SEQ ID NO: 85 - DNA, 1458 bp, Artificial Sequence
  source: /note="Description of Artificial Sequence: Synthetic polynucleotide"
atggccctccctgtcaccgccctgctgcttccgctggctcttctgctccacgccgctcggcccgaggtgcagctggtgcagagcggagccgaggtcaagaagcctggagaatccctgaggatcagctgcaaaggcagcgggtataccttcacctcctactggatgaattgggtccgccagatgcccggaaaaggcctggagtggatgggacggattgacccctacgactcggaaacccattacaaccagaagttcaaggatcacgtgaccatctccgtggacaagtccatttccactgcgtacctccagtggtcaagcctgaaggcctccgacactgctatgtactactgcgcacgcggaaactgggatgattactggggacagggaacaaccgtgactgtgtcctccgggggtggcggtagcggaggagggggctccggcggcggcggctcagggggcggaggaagcgacgtggtcatgactcagtccccggactcactcgcggtgtcgcttggagagagagcgaccatcaactgtcgggcctcaaagagcatcagcaaggacctggcctggtaccagcagaagccgggacagccgccaaagctgctgatctactccgggtccaccttgcaatctggtgtccctgaccggttctccggttccgggtcgggtaccgacttcacgctcactatttcgtcgctgcaagccgaagatgtggccgtgtactattgccaacagcacaacaagtacccctacacttttggcggaggcaccaaggtggaaatcaagaccactaccccagcaccgaggccacccaccccggctcctaccatcgcctcccagcctctgtccctgcgtccggaggcatgtagacccgcagctggtggggccgtgcatacccggggtcttgacttcgcctgcgatatctacatttgggcccctctggctggtacttgcggggtcctgctgctttcactcgtgatcactctttactgtaagcgcggtcggaagaagctgctgtacatctttaagcaacccttcatgaggcctgtgcagactactcaagaggaggacggctgttcatgccggttcccagaggaggaggaaggcggctgcgaactgcgcgtgaaattcagccgcagcgcagatgctccagcctacaagcaggggcagaaccagctctacaacgaactcaatcttggtcggagagaggagtacgacgtgctggacaagcggagaggacgggacccagaaatgggcgggaagccgcgcagaaagaatccccaagagggcctgtacaacgagctccaaaaggataagatggcagaagcctatagcgagattggtatgaaaggggaacgcagaagaggcaaaggccacgacggactgtaccagggactcagcaccgccaccaaggacacctatgacgctcttcacatgcaggccctgccgcctcgg

SEQ ID NO: 86 - DNA, 1458 bp, Artificial Sequence
  source: /note="Description of Artificial Sequence: Synthetic polynucleotide"
atggccctccctgtcaccgccctgctgcttccgctggctcttctgctccacgccgctcggcccgacgtgcagctcacccagtcgccctcatttctgtcggcctcagtgggagacagagtgaccattacttgtcgggcctccaagagcatctccaaggacctggcctggtatcagcagaagccaggaaaggcgcctaagttgctcatctactcggggtcgaccctgcaatctggcgtgccgtcccggttctccggttcgggaagcggtaccgaattcacccttactatctcctccctgcaaccggaggacttcgccacctactactgccaacagcacaacaagtacccgtacactttcgggggtggcacgaaggtcgaaatcaaggggggtggcggtagcggaggagggggctccggcggcggcggctcagggggcggaggaagcgaggtgcagctggtgcagagcggagccgaggtcaagaagcctggagaatccctgaggatcagctgcaaaggcagcgggtataccttcacctcctactggatgaattgggtccgccagatgcccggaaaaggcctggagtggatgggacggattgacccctacgactcggaaacccattacaaccagaagttcaaggatcacgtgaccatctccgtggacaagtccatttccactgcgtacctccagtggtcaagcctgaaggcctccgacactgctatgtactactgcgcacgcggaaactgggatgattactggggacagggaacaaccgtgactgtgtcctccaccactaccccagcaccgaggccacccaccccggctcctaccatcgcctcccagcctctgtccctgcgtccggaggcatgtagacccgcagctggtggggccgtgcatacccggggtcttgacttcgcctgcgatatctacatttgggcccctctggctggtacttgcggggtcctgctgctttcactcgtgatcactctttactgtaagcgcggtcggaagaagctgctgtacatctttaagcaacccttcatgaggcctgtgcagactactcaagaggaggacggctgttcatgccggttcccagaggaggaggaaggcggctgcgaactgcgcgtgaaattcagccgcagcgcagatgctccagcctacaagcaggggcagaaccagctctacaacgaactcaatcttggtcggagagaggagtacgacgtgctggacaagcggagaggacgggacccagaaatgggcgggaagccgcgcagaaagaatccccaagagggcctgtacaacgagctccaaaaggataagatggcagaagcctatagcgagattggtatgaaaggggaacgcagaagaggcaaaggccacgacggactgtaccagggactcagcaccgccaccaaggacacctatgacgctcttcacatgcaggccctgccgcctcgg

SEQ ID NO: 87 - DNA, 1458 bp, Artificial Sequence
  source: /note="Description of Artificial Sequence: Synthetic polynucleotide"
atggccctccctgtcaccgccctgctgcttccgctggctcttctgctccacgccgctcggcccgaagtggtgctgacccagtcgcccgcaaccctctctctgtcgccgggagaacgcgccactctttcctgtcgggcgtccaagagcatctcaaaggacctcgcctggtaccagcagaagcctggtcaagccccgcggctgctgatctactccggctccacgctgcaatcaggaatcccagccagattttccggttcggggtcggggactgacttcaccttgaccattagctcgctggaacctgaggacttcgccgtgtattactgccagcagcacaacaagtacccgtacaccttcggaggcggtactaaggtcgagatcaaggggggtggcggtagcggaggagggggctccggcggcggcggctcagggggcggaggaagcgaggtgcagctggtgcagagcggagccgaggtcaagaagcctggagaatccctgaggatcagctgcaaaggcagcgggtataccttcacctcctactggatgaattgggtccgccagatgcccggaaaaggcctggagtggatgggacggattgacccctacgactcggaaacccattacaaccagaagttcaaggatcacgtgaccatctccgtggacaagtccatttccactgcgtacctccagtggtcaagcctgaaggcctccgacactgctatgtactactgcgcacgcggaaactgggatgattactggggacagggaacaaccgtgactgtgtcctccaccactaccccagcaccgaggccacccaccccggctcctaccatcgcctcccagcctctgtccctgcgtccggaggcatgtagacccgcagctggtggggccgtgcatacccggggtcttgacttcgcctgcgatatctacatttgggcccctctggctggtacttgcggggtcctgctgctttcactcgtgatcactctttactgtaagcgcggtcggaagaagctgctgtacatctttaagcaacccttcatgaggcctgtgcagactactcaagaggaggacggctgttcatgccggttcccagaggaggaggaaggcggctgcgaactgcgcgtgaaattcagccgcagcgcagatgctccagcctacaagcaggggcagaaccagctctacaacgaactcaatcttggtcggagagaggagtacgacgtgctggacaagcggagaggacgggacccagaaatgggcgggaagccgcgcagaaagaatccccaagagggcctgtacaacgagctccaaaaggataagatggcagaagcctatagcgagattggtatgaaaggggaacgcagaagaggcaaaggccacgacggactgtaccagggactcagcaccgccaccaaggacacctatgacgctcttcacatgcaggccctgccgcctcgg

SEQ ID NO: 88 - DNA, 1458 bp, Artificial Sequence
  source: /note="Description of Artificial Sequence: Synthetic polynucleotide"
atggccctccctgtcaccgccctgctgcttccgctggctcttctgctccacgccgctcggcccgacgtcgtgatgacccagtcaccggcattcctgtccgtgactcccggagaaaaggtcacgattacttgccgggcgtccaagagcatctccaaggacctcgcctggtaccaacagaagccggaccaggcccctaagctgttgatctactcggggtccacccttcaatcgggagtgccatcgcggtttagcggttcgggttctgggaccgacttcactttcaccatctcctcactggaagccgaggatgccgccacttactactgtcagcagcacaacaagtatccgtacaccttcggaggcggtaccaaagtggagatcaaggggggtggcggtagcggaggagggggctccggcggcggcggctcagggggcggaggaagcgaggtgcagctggtgcagagcggagccgaggtcaagaagcctggagaatccctgaggatcagctgcaaaggcagcgggtataccttcacctcctactggatgaattgggtccgccagatgcccggaaaaggcctggagtggatgggacggattgacccctacgactcggaaacccattacaaccagaagttcaaggatcacgtgaccatctccgtggacaagtccatttccactgcgtacctccagtggtcaagcctgaaggcctccgacactgctatgtactactgcgcacgcggaaactgggatgattactggggacagggaacaaccgtgactgtgtcctccaccactaccccagcaccgaggccacccaccccggctcctaccatcgcctcccagcctctgtccctgcgtccggaggcatgtagacccgcagctggtggggccgtgcatacccggggtcttgacttcgcctgcgatatctacatttgggcccctctggctggtacttgcggggtcctgctgctttcactcgtgatcactctttactgtaagcgcggtcggaagaagctgctgtacatctttaagcaacccttcatgaggcctgtgcagactactcaagaggaggacggctgttcatgccggttcccagaggaggaggaaggcggctgcgaactgcgcgtgaaattcagccgcagcgcagatgctccagcctacaagcaggggcagaaccagctctacaacgaactcaatcttggtcggagagaggagtacgacgtgctggacaagcggagaggacgggacccagaaatgggcgggaagccgcgcagaaagaatccccaagagggcctgtacaacgagctccaaaaggataagatggcagaagcctatagcgagattggtatgaaaggggaacgcagaagaggcaaaggccacgacggactgtaccagggactcagcaccgccaccaaggacacctatgacgctcttcacatgcaggccctgccgcctcgg

SEQ ID NO: 89 - DNA, 1458 bp, Artificial Sequence
  source: /note="Description of Artificial Sequence: Synthetic polynucleotide"
atggccctccctgtcaccgccctgctgcttccgctggctcttctgctccacgccgctcggcccgacgtggtcatgactcagtccccggactcactcgcggtgtcgcttggagagagagcgaccatcaactgtcgggcctcaaagagcatcagcaaggacctggcctggtaccagcagaagccgggacagccgccaaagctgctgatctactccgggtccaccttgcaatctggtgtccctgaccggttctccggttccgggtcgggtaccgacttcacgctcactatttcgtcgctgcaagccgaagatgtggccgtgtactattgccaacagcacaacaagtacccctacacttttggcggaggcaccaaggtggaaatcaaggggggtggcggtagcggaggagggggctccggcggcggcggctcagggggcggaggaagcgaggtgcagctggtgcagagcggagccgaggtcaagaagcctggagaatccctgaggatcagctgcaaaggcagcgggtataccttcacctcctactggatgaattgggtccgccagatgcccggaaaaggcctggagtggatgggacggattgacccctacgactcggaaacccattacaaccagaagttcaaggatcacgtgaccatctccgtggacaagtccatttccactgcgtacctccagtggtcaagcctgaaggcctccgacactgctatgtactactgcgcacgcggaaactgggatgattactggggacagggaacaaccgtgactgtgtcctccaccactaccccagcaccgaggccacccaccccggctcctaccatcgcctcccagcctctgtccctgcgtccggaggcatgtagacccgcagctggtggggccgtgcatacccggggtcttgacttcgcctgcgatatctacatttgggcccctctggctggtacttgcggggtcctgctgctttcactcgtgatcactctttactgtaagcgcggtcggaagaagctgctgtacatctttaagcaacccttcatgaggcctgtgcagactactcaagaggaggacggctgttcatgccggttcccagaggaggaggaaggcggctgcgaactgcgcgtgaaattcagccgcagcgcagatgctccagcctacaagcaggggcagaaccagctctacaacgaactcaatcttggtcggagagaggagtacgacgtgctggacaagcggagaggacgggacccagaaatgggcgggaagccgcgcagaaagaatccccaagagggcctgtacaacgagctccaaaaggataagatggcagaagcctatagcgagattggtatgaaaggggaacgcagaagaggcaaaggccacgacggactgtaccagggactcagcaccgccaccaaggacacctatgacgctcttcacatgcaggccctgccgcctcgg

SEQ ID NO: 90 - DNA, 1458 bp, Artificial Sequence
  source: /note="Description of Artificial Sequence: Synthetic polynucleotide"
atggccctccctgtcaccgccctgctgcttccgctggctcttctgctccacgccgctcggcccgaagtgcagctcgtcgagagcggagggggactggtgcagcccggaggaagcctgaggctgtcctgcgctgcctccggctacaccttcacctcctactggatgaactgggtcagacaggcacctggaaagggactggtctgggtgtcgcgcattgacccctacgactccgaaacccattacaatcagaaattcaaggaccgcttcaccatctccgtggacaaagccaagagcaccgcgtacctccaaatgaactccctgcgcgctgaggatacagcagtgtactattgcgcccggggaaactgggatgattactggggccagggaactactgtgactgtgtcatccgggggtggcggtagcggaggagggggctccggcggcggcggctcagggggcggaggaagcgacgtgcagctcacccagtcgccctcatttctgtcggcctcagtgggagacagagtgaccattacttgtcgggcctccaagagcatctccaaggacctggcctggtatcagcagaagccaggaaaggcgcctaagttgctcatctactcggggtcgaccctgcaatctggcgtgccgtcccggttctccggttcgggaagcggtaccgaattcacccttactatctcctccctgcaaccggaggacttcgccacctactactgccaacagcacaacaagtacccgtacactttcgggggtggcacgaaggtcgaaatcaagaccactaccccagcaccgaggccacccaccccggctcctaccatcgcctcccagcctctgtccctgcgtccggaggcatgtagacccgcagctggtggggccgtgcatacccggggtcttgacttcgcctgcgatatctacatttgggcccctctggctggtacttgcggggtcctgctgctttcactcgtgatcactctttactgtaagcgcggtcggaagaagctgctgtacatctttaagcaacccttcatgaggcctgtgcagactactcaagaggaggacggctgttcatgccggttcccagaggaggaggaaggcggctgcgaactgcgcgtgaaattcagccgcagcgcagatgctccagcctacaagcaggggcagaaccagctctacaacgaactcaatcttggtcggagagaggagtacgacgtgctggacaagcggagaggacgggacccagaaatgggcgggaagccgcgcagaaagaatccccaagagggcctgtacaacgagctccaaaaggataagatggcagaagcctatagcgagattggtatgaaaggggaacgcagaagaggcaaaggccacgacggactgtaccagggactcagcaccgccaccaaggacacctatgacgctcttcacatgcaggccctgccgcctcgg

SEQ ID NO: 91 - DNA, 1458 bp, Artificial Sequence
  source: /note="Description of Artificial Sequence: Synthetic polynucleotide"
atggccctccctgtcaccgccctgctgcttccgctggctcttctgctccacgccgctcggcccgaagtgcagctcgtcgagagcggagggggactggtgcagcccggaggaagcctgaggctgtcctgcgctgcctccggctacaccttcacctcctactggatgaactgggtcagacaggcacctggaaagggactggtctgggtgtcgcgcattgacccctacgactccgaaacccattacaatcagaaattcaaggaccgcttcaccatctccgtggacaaagccaagagcaccgcgtacctccaaatgaactccctgcgcgctgaggatacagcagtgtactattgcgcccggggaaactgggatgattactggggccagggaactactgtgactgtgtcatccgggggtggcggtagcggaggagggggctccggcggcggcggctcagggggcggaggaagcgaagtggtgctgacccagtcgcccgcaaccctctctctgtcgccgggagaacgcgccactctttcctgtcgggcgtccaagagcatctcaaaggacctcgcctggtaccagcagaagcctggtcaagccccgcggctgctgatctactccggctccacgctgcaatcaggaatcccagccagattttccggttcggggtcggggactgacttcaccttgaccattagctcgctggaacctgaggacttcgccgtgtattactgccagcagcacaacaagtacccgtacaccttcggaggcggtactaaggtcgagatcaagaccactaccccagcaccgaggccacccaccccggctcctaccatcgcctcccagcctctgtccctgcgtccggaggcatgtagacccgcagctggtggggccgtgcatacccggggtcttgacttcgcctgcgatatctacatttgggcccctctggctggtacttgcggggtcctgctgctttcactcgtgatcactctttactgtaagcgcggtcggaagaagctgctgtacatctttaagcaacccttcatgaggcctgtgcagactactcaagaggaggacggctgttcatgccggttcccagaggaggaggaaggcggctgcgaactgcgcgtgaaattcagccgcagcgcagatgctccagcctacaagcaggggcagaaccagctctacaacgaactcaatcttggtcggagagaggagtacgacgtgctggacaagcggagaggacgggacccagaaatgggcgggaagccgcgcagaaagaatccccaagagggcctgtacaacgagctccaaaaggataagatggcagaagcctatagcgagattggtatgaaaggggaacgcagaagaggcaaaggccacgacggactgtaccagggactcagcaccgccaccaaggacacctatgacgctcttcacatgcaggccctgccgcctcgg

SEQ ID NO: 92 - DNA, 1458 bp, Artificial Sequence
  source: /note="Description of Artificial Sequence: Synthetic polynucleotide"
atggccctccctgtcaccgccctgctgcttccgctggctcttctgctccacgccgctcggcccgaagtgcagctcgtcgagagcggagggggactggtgcagcccggaggaagcctgaggctgtcctgcgctgcctccggctacaccttcacctcctactggatgaactgggtcagacaggcacctggaaagggactggtctgggtgtcgcgcattgacccctacgactccgaaacccattacaatcagaaattcaaggaccgcttcaccatctccgtggacaaagccaagagcaccgcgtacctccaaatgaactccctgcgcgctgaggatacagcagtgtactattgcgcccggggaaactgggatgattactggggccagggaactactgtgactgtgtcatccgggggtggcggtagcggaggagggggctccggcggcggcggctcagggggcggaggaagcgacgtcgtgatgacccagtcaccggcattcctgtccgtgactcccggagaaaaggtcacgattacttgccgggcgtccaagagcatctccaaggacctcgcctggtaccaacagaagccggaccaggcccctaagctgttgatctactcggggtccacccttcaatcgggagtgccatcgcggtttagcggttcgggttctgggaccgacttcactttcaccatctcctcactggaagccgaggatgccgccacttactactgtcagcagcacaacaagtatccgtacaccttcggaggcggtaccaaagtggagatcaagaccactaccccagcaccgaggccacccaccccggctcctaccatcgcctcccagcctctgtccctgcgtccggaggcatgtagacccgcagctggtggggccgtgcatacccggggtcttgacttcgcctgcgatatctacatttgggcccctctggctggtacttgcggggtcctgctgctttcactcgtgatcactctttactgtaagcgcggtcggaagaagctgctgtacatctttaagcaacccttcatgaggcctgtgcagactactcaagaggaggacggctgttcatgccggttcccagaggaggaggaaggcggctgcgaactgcgcgtgaaattcagccgcagcgcagatgctccagcctacaagcaggggcagaaccagctctacaacgaactcaatcttggtcggagagaggagtacgacgtgctggacaagcggagaggacgggacccagaaatgggcgggaagccgcgcagaaagaatccccaagagggcctgtacaacgagctccaaaaggataagatggcagaagcctatagcgagattggtatgaaaggggaacgcagaagaggcaaaggccacgacggactgtaccagggactcagcaccgccaccaaggacacctatgacgctcttcacatgcaggccctgccgcctcgg

SEQ ID NO: 93 - DNA, 1458 bp, Artificial Sequence
  source: /note="Description of Artificial Sequence: Synthetic polynucleotide"
atggccctccctgtcaccgccctgctgcttccgctggctcttctgctccacgccgctcggcccgaagtgcagctcgtcgagagcggagggggactggtgcagcccggaggaagcctgaggctgtcctgcgctgcctccggctacaccttcacctcctactggatgaactgggtcagacaggcacctggaaagggactggtctgggtgtcgcgcattgacccctacgactccgaaacccattacaatcagaaattcaaggaccgcttcaccatctccgtggacaaagccaagagcaccgcgtacctccaaatgaactccctgcgcgctgaggatacagcagtgtactattgcgcccggggaaactgggatgattactggggccagggaactactgtgactgtgtcatccgggggtggcggtagcggaggagggggctccggcggcggcggctcagggggcggaggaagcgacgtggtcatgactcagtccccggactcactcgcggtgtcgcttggagagagagcgaccatcaactgtcgggcctcaaagagcatcagcaaggacctggcctggtaccagcagaagccgggacagccgccaaagctgctgatctactccgggtccaccttgcaatctggtgtccctgaccggttctccggttccgggtcgggtaccgacttcacgctcactatttcgtcgctgcaagccgaagatgtggccgtgtactattgccaacagcacaacaagtacccctacacttttggcggaggcaccaaggtggaaatcaagaccactaccccagcaccgaggccacccaccccggctcctaccatcgcctcccagcctctgtccctgcgtccggaggcatgtagacccgcagctggtggggccgtgcatacccggggtcttgacttcgcctgcgatatctacatttgggcccctctggctggtacttgcggggtcctgctgctttcactcgtgatcactctttactgtaagcgcggtcggaagaagctgctgtacatctttaagcaacccttcatgaggcctgtgcagactactcaagaggaggacggctgttcatgccggttcccagaggaggaggaaggcggctgcgaactgcgcgtgaaattcagccgcagcgcagatgctccagcctacaagcaggggcagaaccagctctacaacgaactcaatcttggtcggagagaggagtacgacgtgctggacaagcggagaggacgggacccagaaatgggcgggaagccgcgcagaaagaatccccaagagggcctgtacaacgagctccaaaaggataagatggcagaagcctatagcgagattggtatgaaaggggaacgcagaagaggcaaaggccacgacggactgtaccagggactcagcaccgccaccaaggacacctatgacgctcttcacatgcaggccctgccgcctcgg

SEQ ID NO: 94 - DNA, 1458 bp, Artificial Sequence
  source: /note="Description of Artificial Sequence: Synthetic polynucleotide"
atggccctccctgtcaccgccctgctgcttccgctggctcttctgctccacgccgctcggcccgacgtgcagctcacccagtcgccctcatttctgtcggcctcagtgggagacagagtgaccattacttgtcgggcctccaagagcatctccaaggacctggcctggtatcagcagaagccaggaaaggcgcctaagttgctcatctactcggggtcgaccctgcaatctggcgtgccgtcccggttctccggttcgggaagcggtaccgaattcacccttactatctcctccctgcaaccggaggacttcgccacctactactgccaacagcacaacaagtacccgtacactttcgggggtggcacgaaggtcgaaatcaaggggggtggcggtagcggaggagggggctccggcggcggcggctcagggggcggaggaagcgaagtgcagctcgtcgagagcggagggggactggtgcagcccggaggaagcctgaggctgtcctgcgctgcctccggctacaccttcacctcctactggatgaactgggtcagacaggcacctggaaagggactggtctgggtgtcgcgcattgacccctacgactccgaaacccattacaatcagaaattcaaggaccgcttcaccatctccgtggacaaagccaagagcaccgcgtacctccaaatgaactccctgcgcgctgaggatacagcagtgtactattgcgcccggggaaactgggatgattactggggccagggaactactgtgactgtgtcatccaccactaccccagcaccgaggccacccaccccggctcctaccatcgcctcccagcctctgtccctgcgtccggaggcatgtagacccgcagctggtggggccgtgcatacccggggtcttgacttcgcctgcgatatctacatttgggcccctctggctggtacttgcggggtcctgctgctttcactcgtgatcactctttactgtaagcgcggtcggaagaagctgctgtacatctttaagcaacccttcatgaggcctgtgcagactactcaagaggaggacggctgttcatgccggttcccagaggaggaggaaggcggctgcgaactgcgcgtgaaattcagccgcagcgcagatgctccagcctacaagcaggggcagaaccagctctacaacgaactcaatcttggtcggagagaggagtacgacgtgctggacaagcggagaggacgggacccagaaatgggcgggaagccgcgcagaaagaatccccaagagggcctgtacaacgagctccaaaaggataagatggcagaagcctatagcgagattggtatgaaaggggaacgcagaagaggcaaaggccacgacggactgtaccagggactcagcaccgccaccaaggacacctatgacgctcttcacatgcaggccctgccgcctcgg

SEQ ID NO: 95 - DNA, 1458 bp, Artificial Sequence
  source: /note="Description of Artificial Sequence: Synthetic polynucleotide"
atggccctccctgtcaccgccctgctgcttccgctggctcttctgctccacgccgctcggcccgaagtggtgctgacccagtcgcccgcaaccctctctctgtcgccgggagaacgcgccactctttcctgtcgggcgtccaagagcatctcaaaggacctcgcctggtaccagcagaagcctggtcaagccccgcggctgctgatctactccggctccacgctgcaatcaggaatcccagccagattttccggttcggggtcggggactgacttcaccttgaccattagctcgctggaacctgaggacttcgccgtgtattactgccagcagcacaacaagtacccgtacaccttcggaggcggtactaaggtcgagatcaaggggggtggcggtagcggaggagggggctccggcggcggcggctcagggggcggaggaagcgaagtgcagctcgtcgagagcggagggggactggtgcagcccggaggaagcctgaggctgtcctgcgctgcctccggctacaccttcacctcctactggatgaactgggtcagacaggcacctggaaagggactggtctgggtgtcgcgcattgacccctacgactccgaaacccattacaatcagaaattcaaggaccgcttcaccatctccgtggacaaagccaagagcaccgcgtacctccaaatgaactccctgcgcgctgaggatacagcagtgtactattgcgcccggggaaactgggatgattactggggccagggaactactgtgactgtgtcatccaccactaccccagcaccgaggccacccaccccggctcctaccatcgcctcccagcctctgtccctgcgtccggaggcatgtagacccgcagctggtggggccgtgcatacccggggtcttgacttcgcctgcgatatctacatttgggcccctctggctggtacttgcggggtcctgctgctttcactcgtgatcactctttactgtaagcgcggtcggaagaagctgctgtacatctttaagcaacccttcatgaggcctgtgcagactactcaagaggaggacggctgttcatgccggttcccagaggaggaggaaggcggctgcgaactgcgcgtgaaattcagccgcagcgcagatgctccagcctacaagcaggggcagaaccagctctacaacgaactcaatcttggtcggagagaggagtacgacgtgctggacaagcggagaggacgggacccagaaatgggcgggaagccgcgcagaaagaatccccaagagggcctgtacaacgagctccaaaaggataagatggcagaagcctatagcgagattggtatgaaaggggaacgcagaagaggcaaaggccacgacggactgtaccagggactcagcaccgccaccaaggacacctatgacgctcttcacatgcaggccctgccgcctcgg

SEQ ID NO: 96 - DNA, 1458 bp, Artificial Sequence
  source: /note="Description of Artificial Sequence: Synthetic polynucleotide"
atggccctccctgtcaccgccctgctgcttccgctggctcttctgctccacgccgctcggcccgacgtcgtgatgacccagtcaccggcattcctgtccgtgactcccggagaaaaggtcacgattacttgccgggcgtccaagagcatctccaaggacctcgcctggtaccaacagaagccggaccaggcccctaagctgttgatctactcggggtccacccttcaatcgggagtgccatcgcggtttagcggttcgggttctgggaccgacttcactttcaccatctcctcactggaagccgaggatgccgccacttactactgtcagcagcacaacaagtatccgtacaccttcggaggcggtaccaaagtggagatcaaggggggtggcggtagcggaggagggggctccggcggcggcggctcagggggcggaggaagcgaagtgcagctcgtcgagagcggagggggactggtgcagcccggaggaagcctgaggctgtcctgcgctgcctccggctacaccttcacctcctactggatgaactgggtcagacaggcacctggaaagggactggtctgggtgtcgcgcattgacccctacgactccgaaacccattacaatcagaaattcaaggaccgcttcaccatctccgtggacaaagccaagagcaccgcgtacctccaaatgaactccctgcgcgctgaggatacagcagtgtactattgcgcccggggaaactgggatgattactggggccagggaactactgtgactgtgtcatccaccactaccccagcaccgaggccacccaccccggctcctaccatcgcctcccagcctctgtccctgcgtccggaggcatgtagacccgcagctggtggggccgtgcatacccggggtcttgacttcgcctgcgatatctacatttgggcccctctggctggtacttgcggggtcctgctgctttcactcgtgatcactctttactgtaagcgcggtcggaagaagctgctgtacatctttaagcaacccttcatgaggcctgtgcagactactcaagaggaggacggctgttcatgccggttcccagaggaggaggaaggcggctgcgaactgcgcgtgaaattcagccgcagcgcagatgctccagcctacaagcaggggcagaaccagctctacaacgaactcaatcttggtcggagagaggagtacgacgtgctggacaagcggagaggacgggacccagaaatgggcgggaagccgcgcagaaagaatccccaagagggcctgtacaacgagctccaaaaggataagatggcagaagcctatagcgagattggtatgaaaggggaacgcagaagaggcaaaggccacgacggactgtaccagggactcagcaccgccaccaaggacacctatgacgctcttcacatgcaggccctgccgcctcgg

SEQ ID NO: 97 - DNA, 1458 bp, Artificial Sequence
  source: /note="Description of Artificial Sequence: Synthetic polynucleotide"
atggccctccctgtcaccgccctgctgcttccgctggctcttctgctccacgccgctcggcccgacgtggtcatgactcagtccccggactcactcgcggtgtcgcttggagagagagcgaccatcaactgtcgggcctcaaagagcatcagcaaggacctggcctggtaccagcagaagccgggacagccgccaaagctgctgatctactccgggtccaccttgcaatctggtgtccctgaccggttctccggttccgggtcgggtaccgacttcacgctcactatttcgtcgctgcaagccgaagatgtggccgtgtactattgccaacagcacaacaagtacccctacacttttggcggaggcaccaaggtggaaatcaaggggggtggcggtagcggaggagggggctccggcggcggcggctcagggggcggaggaagcgaagtgcagctcgtcgagagcggagggggactggtgcagcccggaggaagcctgaggctgtcctgcgctgcctccggctacaccttcacctcctactggatgaactgggtcagacaggcacctggaaagggactggtctgggtgtcgcgcattgacccctacgactccgaaacccattacaatcagaaattcaaggaccgcttcaccatctccgtggacaaagccaagagcaccgcgtacctccaaatgaactccctgcgcgctgaggatacagcagtgtactattgcgcccggggaaactgggatgattactggggccagggaactactgtgactgtgtcatccaccactaccccagcaccgaggccacccaccccggctcctaccatcgcctcccagcctctgtccctgcgtccggaggcatgtagacccgcagctggtggggccgtgcatacccggggtcttgacttcgcctgcgatatctacatttgggcccctctggctggtacttgcggggtcctgctgctttcactcgtgatcactctttactgtaagcgcggtcggaagaagctgctgtacatctttaagcaacccttcatgaggcctgtgcagactactcaagaggaggacggctgttcatgccggttcccagaggaggaggaaggcggctgcgaactgcgcgtgaaattcagccgcagcgcagatgctccagcctacaagcaggggcagaaccagctctacaacgaactcaatcttggtcggagagaggagtacgacgtgctggacaagcggagaggacgggacccagaaatgggcgggaagccgcgcagaaagaatccccaagagggcctgtacaacgagctccaaaaggataagatggcagaagcctatagcgagattggtatgaaaggggaacgcagaagaggcaaaggccacgacggactgtaccagggactcagcaccgccaccaaggacacctatgacgctcttcacatgcaggccctgccgcctcgg

SEQ ID NO: 98 - protein, 487 aa, Artificial Sequence
  source: /note="Description of Artificial Sequence: Synthetic polypeptide"
MALPVTALLLPLALLLHAARPQVQLVQSGAEVKKPGASVKVSCKASGYTFTGYYMHWVRQAPGQGLEWMGWINPNSGGTNYAQKFQGRVTMTRDTSISTAYMELSRLRSDDTAVYYCARDMNILATVPFDIWGQGTMVTVSSGGGGSGGGGSGGGGSDIQMTQSPSSLSASVGDRVTITCRASQSISTYLNWYQQKPGKAPNLLIYAAFSLQSGVPSRFSGSGSGTDFTLTINSLQPEDFATYYCQQGDSVPLTFGGGTKLEIKTTTPAPRPPTPAPTIASQPLSLRPEACRPAAGGAVHTRGLDFACDIYIWAPLAGTCGVLLLSLVITLYCKRGRKKLLYIFKQPFMRPVQTTQEEDGCSCRFPEEEEGGCELRVKFSRSADAPAYKQGQNQLYNELNLGRREEYDVLDKRRGRDPEMGGKPRRKNPQEGLYNELQKDKMAEAYSEIGMKGERRRGKGHDGLYQGLSTATKDTYDALHMQALPPR

SEQ ID NO: 99 - protein, 487 aa, Artificial Sequence
  source: /note="Description of Artificial Sequence: Synthetic polypeptide"
MALPVTALLLPLALLLHAARPQVQLVQSGAEVKKPGASVKVSCKASGYTFTGYYMHWVRQAPGQGLEWMGWINPNSGGTNYAQKFQGRVTLTRDTSISTVYMELSRLRSDDTAVYYCARDMNILATVPFDIWGQGTMVTVSSGGGGSGGGGSGGGGSDIQMTQSPSSLSASVGDRVTITCRASQSISSYLNWYQQKPGKAPKLLIYAASSLQSGVPSRFSGSGSGTDFTLTVNSLQPEDFATYYCQQGDSVPLTFGGGTRLEIKTTTPAPRPPTPAPTIASQPLSLRPEACRPAAGGAVHTRGLDFACDIYIWAPLAGTCGVLLLSLVITLYCKRGRKKLLYIFKQPFMRPVQTTQEEDGCSCRFPEEEEGGCELRVKFSRSADAPAYKQGQNQLYNELNLGRREEYDVLDKRRGRDPEMGGKPRRKNPQEGLYNELQKDKMAEAYSEIGMKGERRRGKGHDGLYQGLSTATKDTYDALHMQALPPR

SEQ ID NO: 100 - protein, 487 aa, Artificial Sequence
  source: /note="Description of Artificial Sequence: Synthetic polypeptide"
MALPVTALLLPLALLLHAARPQVQLVQSGAEVKKPGASVKVSCKASGYIFTGYYIHWVRQAPGQGLEWMGWINPNSGGTNYAQKFQGRVTMTRDTSISTAYMELSGLRSDDPAVYYCARDMNILATVPFDIWGQGTLVTVSSGGGGSGGGGSGGGGSDIQLTQSPSSLSASVGDRVTITCRASQSISSYLNWYQQKPGKAPKLLIYAASSLQSGVPSRFSGSGSGTDFTLTVNSLQPEDFATYYCQQGDSVPLTFGGGTKVEIKTTTPAPRPPTPAPTIASQPLSLRPEACRPAAGGAVHTRGLDFACDIYIWAPLAGTCGVLLLSLVITLYCKRGRKKLLYIFKQPFMRPVQTTQEEDGCSCRFPEEEEGGCELRVKFSRSADAPAYKQGQNQLYNELNLGRREEYDVLDKRRGRDPEMGGKPRRKNPQEGLYNELQKDKMAEAYSEIGMKGERRRGKGHDGLYQGLSTATKDTYDALHMQALPPR

SEQ ID NO: 101 - protein, 336 aa, Artificial Sequence
  source: /note="Description of Artificial Sequence: Synthetic polypeptide"
MALPVTALLLPLALLLHAARPQVQLQQSGAEVKKSGASVKVSCKASGYTFTDYYMHWLRQAPGQGLEWMGWINPNSGDTNYAQKFQGRVTLTRDTSISTVYMELSRLRSDDTAVYYCARDMNILATVPFDIWGQGTMVTVSSASGGGGSGGRASGGGGSDIQMTQSPSSLSASVGDRVTITCRASQSISSYLNWYQQKPGKAPKLLIYAASSLQSGVPSRFSGSGSGTDFTLTISSLQPEDFATYYCQQGDSVPLTFGGGTKVEIKTTTPAPRPPTPAPTIASQPLSLRPEACRPAAGGAVHTRGLDFACDIYIWAPLAGTCGVLLLSLVITLYCK

SEQ ID NO: 102-124 - skipped (23 entries)

SEQ ID NO: 125 - protein, 486 aa, Artificial Sequence
  source: /note="Description of Artificial Sequence: Synthetic polypeptide"
MALPVTALLLPLALLLHAARPQVQLVQSGAEVKKPGASVKVSCKASGYTFTSYWMNWVRQAPGQGLEWMGRIDPYDSETHYNQKFKDRVTMTVDKSTSTAYMELSSLRSEDTAVYYCARGNWDDYWGQGTTVTVSSGGGGSGGGGSGGGGSGGGGSDVQLTQSPSFLSASVGDRVTITCRASKSISKDLAWYQQKPGKAPKLLIYSGSTLQSGVPSRFSGSGSGTEFTLTISSLQPEDFATYYCQQHNKYPYTFGGGTKVEIKTTTPAPRPPTPAPTIASQPLSLRPEACRPAAGGAVHTRGLDFACDIYIWAPLAGTCGVLLLSLVITLYCKRGRKKLLYIFKQPFMRPVQTTQEEDGCSCRFPEEEEGGCELRVKFSRSADAPAYKQGQNQLYNELNLGRREEYDVLDKRRGRDPEMGGKPRRKNPQEGLYNELQKDKMAEAYSEIGMKGERRRGKGHDGLYQGLSTATKDTYDALHMQALPPR

SEQ ID NO: 126 - protein, 486 aa, Artificial Sequence
  source: /note="Description of Artificial Sequence: Synthetic polypeptide"
MALPVTALLLPLALLLHAARPQVQLVQSGAEVKKPGASVKVSCKASGYTFTSYWMNWVRQAPGQGLEWMGRIDPYDSETHYNQKFKDRVTMTVDKSTSTAYMELSSLRSEDTAVYYCARGNWDDYWGQGTTVTVSSGGGGSGGGGSGGGGSGGGGSEVVLTQSPATLSLSPGERATLSCRASKSISKDLAWYQQKPGQAPRLLIYSGSTLQSGIPARFSGSGSGTDFTLTISSLEPEDFAVYYCQQHNKYPYTFGGGTKVEIKTTTPAPRPPTPAPTIASQPLSLRPEACRPAAGGAVHTRGLDFACDIYIWAPLAGTCGVLLLSLVITLYCKRGRKKLLYIFKQPFMRPVQTTQEEDGCSCRFPEEEEGGCELRVKFSRSADAPAYKQGQNQLYNELNLGRREEYDVLDKRRGRDPEMGGKPRRKNPQEGLYNELQKDKMAEAYSEIGMKGERRRGKGHDGLYQGLSTATKDTYDALHMQALPPR

SEQ ID NO: 127 - protein, 486 aa, Artificial Sequence
  source: /note="Description of Artificial Sequence: Synthetic polypeptide"
MALPVTALLLPLALLLHAARPQVQLVQSGAEVKKPGASVKVSCKASGYTFTSYWMNWVRQAPGQGLEWMGRIDPYDSETHYNQKFKDRVTMTVDKSTSTAYMELSSLRSEDTAVYYCARGNWDDYWGQGTTVTVSSGGGGSGGGGSGGGGSGGGGSDVVMTQSPAFLSVTPGEKVTITCRASKSISKDLAWYQQKPDQAPKLLIYSGSTLQSGVPSRFSGSGSGTDFTFTISSLEAEDAATYYCQQHNKYPYTFGGGTKVEIKTTTPAPRPPTPAPTIASQPLSLRPEACRPAAGGAVHTRGLDFACDIYIWAPLAGTCGVLLLSLVITLYCKRGRKKLLYIFKQPFMRPVQTTQEEDGCSCRFPEEEEGGCELRVKFSRSADAPAYKQGQNQLYNELNLGRREEYDVLDKRRGRDPEMGGKPRRKNPQEGLYNELQKDKMAEAYSEIGMKGERRRGKGHDGLYQGLSTATKDTYDALHMQALPPR

SEQ ID NO: 128 - protein, 486 aa, Artificial Sequence
  source: /note="Description of Artificial Sequence: Synthetic polypeptide"
MALPVTALLLPLALLLHAARPQVQLVQSGAEVKKPGASVKVSCKASGYTFTSYWMNWVRQAPGQGLEWMGRIDPYDSETHYNQKFKDRVTMTVDKSTSTAYMELSSLRSEDTAVYYCARGNWDDYWGQGTTVTVSSGGGGSGGGGSGGGGSGGGGSDVVMTQSPDSLAVSLGERATINCRASKSISKDLAWYQQKPGQPPKLLIYSGSTLQSGVPDRFSGSGSGTDFTLTISSLQAEDVAVYYCQQHNKYPYTFGGGTKVEIKTTTPAPRPPTPAPTIASQPLSLRPEACRPAAGGAVHTRGLDFACDIYIWAPLAGTCGVLLLSLVITLYCKRGRKKLLYIFKQPFMRPVQTTQEEDGCSCRFPEEEEGGCELRVKFSRSADAPAYKQGQNQLYNELNLGRREEYDVLDKRRGRDPEMGGKPRRKNPQEGLYNELQKDKMAEAYSEIGMKGERRRGKGHDGLYQGLSTATKDTYDALHMQALPPR

SEQ ID NO: 129 - protein, 486 aa, Artificial Sequence
  source: /note="Description of Artificial Sequence: Synthetic polypeptide"
MALPVTALLLPLALLLHAARPDVQLTQSPSFLSASVGDRVTITCRASKSISKDLAWYQQKPGKAPKLLIYSGSTLQSGVPSRFSGSGSGTEFTLTISSLQPEDFATYYCQQHNKYPYTFGGGTKVEIKGGGGSGGGGSGGGGSGGGGSQVQLVQSGAEVKKPGASVKVSCKASGYTFTSYWMNWVRQAPGQGLEWMGRIDPYDSETHYNQKFKDRVTMTVDKSTSTAYMELSSLRSEDTAVYYCARGNWDDYWGQGTTVTVSSTTTPAPRPPTPAPTIASQPLSLRPEACRPAAGGAVHTRGLDFACDIYIWAPLAGTCGVLLLSLVITLYCKRGRKKLLYIFKQPFMRPVQTTQEEDGCSCRFPEEEEGGCELRVKFSRSADAPAYKQGQNQLYNELNLGRREEYDVLDKRRGRDPEMGGKPRRKNPQEGLYNELQKDKMAEAYSEIGMKGERRRGKGHDGLYQGLSTATKDTYDALHMQALPPR

SEQ ID NO: 130 - protein, 486 aa, Artificial Sequence
  source: /note="Description of Artificial Sequence: Synthetic polypeptide"
MALPVTALLLPLALLLHAARPEVVLTQSPATLSLSPGERATLSCRASKSISKDLAWYQQKPGQAPRLLIYSGSTLQSGIPARFSGSGSGTDFTLTISSLEPEDFAVYYCQQHNKYPYTFGGGTKVEIKGGGGSGGGGSGGGGSGGGGSQVQLVQSGAEVKKPGASVKVSCKASGYTFTSYWMNWVRQAPGQGLEWMGRIDPYDSETHYNQKFKDRVTMTVDKSTSTAYMELSSLRSEDTAVYYCARGNWDDYWGQGTTVTVSSTTTPAPRPPTPAPTIASQPLSLRPEACRPAAGGAVHTRGLDFACDIYIWAPLAGTCGVLLLSLVITLYCKRGRKKLLYIFKQPFMRPVQTTQEEDGCSCRFPEEEEGGCELRVKFSRSADAPAYKQGQNQLYNELNLGRREEYDVLDKRRGRDPEMGGKPRRKNPQEGLYNELQKDKMAEAYSEIGMKGERRRGKGHDGLYQGLSTATKDTYDALHMQALPPR

SEQ ID NO: 131 - protein, 486 aa, Artificial Sequence
  source: /note="Description of Artificial Sequence: Synthetic polypeptide"
MALPVTALLLPLALLLHAARPDVVMTQSPAFLSVTPGEKVTITCRASKSISKDLAWYQQKPDQAPKLLIYSGSTLQSGVPSRFSGSGSGTDFTFTISSLEAEDAATYYCQQHNKYPYTFGGGTKVEIKGGGGSGGGGSGGGGSGGGGSQVQLVQSGAEVKKPGASVKVSCKASGYTFTSYWMNWVRQAPGQGLEWMGRIDPYDSETHYNQKFKDRVTMTVDKSTSTAYMELSSLRSEDTAVYYCARGNWDDYWGQGTTVTVSSTTTPAPRPPTPAPTIASQPLSLRPEACRPAAGGAVHTRGLDFACDIYIWAPLAGTCGVLLLSLVITLYCKRGRKKLLYIFKQPFMRPVQTTQEEDGCSCRFPEEEEGGCELRVKFSRSADAPAYKQGQNQLYNELNLGRREEYDVLDKRRGRDPEMGGKPRRKNPQEGLYNELQKDKMAEAYSEIGMKGERRRGKGHDGLYQGLSTATKDTYDALHMQALPPR

SEQ ID NO: 132 - protein, 486 aa, Artificial Sequence
  source: /note="Description of Artificial Sequence: Synthetic polypeptide"
MALPVTALLLPLALLLHAARPDVVMTQSPDSLAVSLGERATINCRASKSISKDLAWYQQKPGQPPKLLIYSGSTLQSGVPDRFSGSGSGTDFTLTISSLQAEDVAVYYCQQHNKYPYTFGGGTKVEIKGGGGSGGGGSGGGGSGGGGSQVQLVQSGAEVKKPGASVKVSCKASGYTFTSYWMNWVRQAPGQGLEWMGRIDPYDSETHYNQKFKDRVTMTVDKSTSTAYMELSSLRSEDTAVYYCARGNWDDYWGQGTTVTVSSTTTPAPRPPTPAPTIASQPLSLRPEACRPAAGGAVHTRGLDFACDIYIWAPLAGTCGVLLLSLVITLYCKRGRKKLLYIFKQPFMRPVQTTQEEDGCSCRFPEEEEGGCELRVKFSRSADAPAYKQGQNQLYNELNLGRREEYDVLDKRRGRDPEMGGKPRRKNPQEGLYNELQKDKMAEAYSEIGMKGERRRGKGHDGLYQGLSTATKDTYDALHMQALPPR

SEQ ID NO: 133 - protein, 486 aa, Artificial Sequence
  source: /note="Description of Artificial Sequence: Synthetic polypeptide"
MALPVTALLLPLALLLHAARPQVQLVQSGSELKKPGASVKVSCKASGYTFTSYWMNWVRQAPGQGLEWMGRIDPYDSETHYNQKFKDRFVFSVDKSVSTAYLQISSLKAEDTAVYYCARGNWDDYWGQGTTVTVSSGGGGSGGGGSGGGGSGGGGSDVQLTQSPSFLSASVGDRVTITCRASKSISKDLAWYQQKPGKAPKLLIYSGSTLQSGVPSRFSGSGSGTEFTLTISSLQPEDFATYYCQQHNKYPYTFGGGTKVEIKTTTPAPRPPTPAPTIASQPLSLRPEACRPAAGGAVHTRGLDFACDIYIWAPLAGTCGVLLLSLVITLYCKRGRKKLLYIFKQPFMRPVQTTQEEDGCSCRFPEEEEGGCELRVKFSRSADAPAYKQGQNQLYNELNLGRREEYDVLDKRRGRDPEMGGKPRRKNPQEGLYNELQKDKMAEAYSEIGMKGERRRGKGHDGLYQGLSTATKDTYDALHMQALPPR

SEQ ID NO: 134 - protein, 486 aa, Artificial Sequence
  source: /note="Description of Artificial Sequence: Synthetic polypeptide"
MALPVTALLLPLALLLHAARPQVQLVQSGSELKKPGASVKVSCKASGYTFTSYWMNWVRQAPGQGLEWMGRIDPYDSETHYNQKFKDRFVFSVDKSVSTAYLQISSLKAEDTAVYYCARGNWDDYWGQGTTVTVSSGGGGSGGGGSGGGGSGGGGSEVVLTQSPATLSLSPGERATLSCRASKSISKDLAWYQQKPGQAPRLLIYSGSTLQSGIPARFSGSGSGTDFTLTISSLEPEDFAVYYCQQHNKYPYTFGGGTKVEIKTTTPAPRPPTPAPTIASQPLSLRPEACRPAAGGAVHTRGLDFACDIYIWAPLAGTCGVLLLSLVITLYCKRGRKKLLYIFKQPFMRPVQTTQEEDGCSCRFPEEEEGGCELRVKFSRSADAPAYKQGQNQLYNELNLGRREEYDVLDKRRGRDPEMGGKPRRKNPQEGLYNELQKDKMAEAYSEIGMKGERRRGKGHDGLYQGLSTATKDTYDALHMQALPPR

SEQ ID NO: 135 - protein, 486 aa, Artificial Sequence
  source: /note="Description of Artificial Sequence: Synthetic polypeptide"
MALPVTALLLPLALLLHAARPQVQLVQSGSELKKPGASVKVSCKASGYTFTSYWMNWVRQAPGQGLEWMGRIDPYDSETHYNQKFKDRFVFSVDKSVSTAYLQISSLKAEDTAVYYCARGNWDDYWGQGTTVTVSSGGGGSGGGGSGGGGSGGGGSDVVMTQSPAFLSVTPGEKVTITCRASKSISKDLAWYQQKPDQAPKLLIYSGSTLQSGVPSRFSGSGSGTDFTFTISSLEAEDAATYYCQQHNKYPYTFGGGTKVEIKTTTPAPRPPTPAPTIASQPLSLRPEACRPAAGGAVHTRGLDFACDIYIWAPLAGTCGVLLLSLVITLYCKRGRKKLLYIFKQPFMRPVQTTQEEDGCSCRFPEEEEGGCELRVKFSRSADAPAYKQGQNQLYNELNLGRREEYDVLDKRRGRDPEMGGKPRRKNPQEGLYNELQKDKMAEAYSEIGMKGERRRGKGHDGLYQGLSTATKDTYDALHMQALPPR

SEQ ID NO: 136 - protein, 486 aa, Artificial Sequence
  source: /note="Description of Artificial Sequence: Synthetic polypeptide"
MALPVTALLLPLALLLHAARPQVQLVQSGSELKKPGASVKVSCKASGYTFTSYWMNWVRQAPGQGLEWMGRIDPYDSETHYNQKFKDRFVFSVDKSVSTAYLQISSLKAEDTAVYYCARGNWDDYWGQGTTVTVSSGGGGSGGGGSGGGGSGGGGSDVVMTQSPDSLAVSLGERATINCRASKSISKDLAWYQQKPGQPPKLLIYSGSTLQSGVPDRFSGSGSGTDFTLTISSLQAEDVAVYYCQQHNKYPYTFGGGTKVEIKTTTPAPRPPTPAPTIASQPLSLRPEACRPAAGGAVHTRGLDFACDIYIWAPLAGTCGVLLLSLVITLYCKRGRKKLLYIFKQPFMRPVQTTQEEDGCSCRFPEEEEGGCELRVKFSRSADAPAYKQGQNQLYNELNLGRREEYDVLDKRRGRDPEMGGKPRRKNPQEGLYNELQKDKMAEAYSEIGMKGERRRGKGHDGLYQGLSTATKDTYDALHMQALPPR

SEQ ID NO: 137 - protein, 486 aa, Artificial Sequence
  source: /note="Description of Artificial Sequence: Synthetic polypeptide"
MALPVTALLLPLALLLHAARPDVQLTQSPSFLSASVGDRVTITCRASKSISKDLAWYQQKPGKAPKLLIYSGSTLQSGVPSRFSGSGSGTEFTLTISSLQPEDFATYYCQQHNKYPYTFGGGTKVEIKGGGGSGGGGSGGGGSGGGGSQVQLVQSGSELKKPGASVKVSCKASGYTFTSYWMNWVRQAPGQGLEWMGRIDPYDSETHYNQKFKDRFVFSVDKSVSTAYLQISSLKAEDTAVYYCARGNWDDYWGQGTTVTVSSTTTPAPRPPTPAPTIASQPLSLRPEACRPAAGGAVHTRGLDFACDIYIWAPLAGTCGVLLLSLVITLYCKRGRKKLLYIFKQPFMRPVQTTQEEDGCSCRFPEEEEGGCELRVKFSRSADAPAYKQGQNQLYNELNLGRREEYDVLDKRRGRDPEMGGKPRRKNPQEGLYNELQKDKMAEAYSEIGMKGERRRGKGHDGLYQGLSTATKDTYDALHMQALPPR

SEQ ID NO: 138 - protein, 486 aa, Artificial Sequence
  source: /note="Description of Artificial Sequence: Synthetic polypeptide"
MALPVTALLLPLALLLHAARPEVVLTQSPATLSLSPGERATLSCRASKSISKDLAWYQQKPGQAPRLLIYSGSTLQSGIPARFSGSGSGTDFTLTISSLEPEDFAVYYCQQHNKYPYTFGGGTKVEIKGGGGSGGGGSGGGGSGGGGSQVQLVQSGSELKKPGASVKVSCKASGYTFTSYWMNWVRQAPGQGLEWMGRIDPYDSETHYNQKFKDRFVFSVDKSVSTAYLQISSLKAEDTAVYYCARGNWDDYWGQGTTVTVSSTTTPAPRPPTPAPTIASQPLSLRPEACRPAAGGAVHTRGLDFACDIYIWAPLAGTCGVLLLSLVITLYCKRGRKKLLYIFKQPFMRPVQTTQEEDGCSCRFPEEEEGGCELRVKFSRSADAPAYKQGQNQLYNELNLGRREEYDVLDKRRGRDPEMGGKPRRKNPQEGLYNELQKDKMAEAYSEIGMKGERRRGKGHDGLYQGLSTATKDTYDALHMQALPPR

SEQ ID NO: 139 - protein, 486 aa, Artificial Sequence
  source: /note="Description of Artificial Sequence: Synthetic polypeptide"
MALPVTALLLPLALLLHAARPDVVMTQSPAFLSVTPGEKVTITCRASKSISKDLAWYQQKPDQAPKLLIYSGSTLQSGVPSRFSGSGSGTDFTFTISSLEAEDAATYYCQQHNKYPYTFGGGTKVEIKGGGGSGGGGSGGGGSGGGGSQVQLVQSGSELKKPGASVKVSCKASGYTFTSYWMNWVRQAPGQGLEWMGRIDPYDSETHYNQKFKDRFVFSVDKSVSTAYLQISSLKAEDTAVYYCARGNWDDYWGQGTTVTVSSTTTPAPRPPTPAPTIASQPLSLRPEACRPAAGGAVHTRGLDFACDIYIWAPLAGTCGVLLLSLVITLYCKRGRKKLLYIFKQPFMRPVQTTQEEDGCSCRFPEEEEGGCELRVKFSRSADAPAYKQGQNQLYNELNLGRREEYDVLDKRRGRDPEMGGKPRRKNPQEGLYNELQKDKMAEAYSEIGMKGERRRGKGHDGLYQGLSTATKDTYDALHMQALPPR

SEQ ID NO: 140 - protein, 486 aa, Artificial Sequence
  source: /note="Description of Artificial Sequence: Synthetic polypeptide"
MALPVTALLLPLALLLHAARPDVVMTQSPDSLAVSLGERATINCRASKSISKDLAWYQQKPGQPPKLLIYSGSTLQSGVPDRFSGSGSGTDFTLTISSLQAEDVAVYYCQQHNKYPYTFGGGTKVEIKGGGGSGGGGSGGGGSGGGGSQVQLVQSGSELKKPGASVKVSCKASGYTFTSYWMNWVRQAPGQGLEWMGRIDPYDSETHYNQKFKDRFVFSVDKSVSTAYLQISSLKAEDTAVYYCARGNWDDYWGQGTTVTVSSTTTPAPRPPTPAPTIASQPLSLRPEACRPAAGGAVHTRGLDFACDIYIWAPLAGTCGVLLLSLVITLYCKRGRKKLLYIFKQPFMRPVQTTQEEDGCSCRFPEEEEGGCELRVKFSRSADAPAYKQGQNQLYNELNLGRREEYDVLDKRRGRDPEMGGKPRRKNPQEGLYNELQKDKMAEAYSEIGMKGERRRGKGHDGLYQGLSTATKDTYDALHMQALPPR

SEQ ID NO: 141 - protein, 486 aa, Artificial Sequence
  source: /note="Description of Artificial Sequence: Synthetic polypeptide"
MALPVTALLLPLALLLHAARPEVQLVQSGAEVKKPGESLRISCKGSGYTFTSYWMNWVRQMPGKGLEWMGRIDPYDSETHYNQKFKDHVTISVDKSISTAYLQWSSLKASDTAMYYCARGNWDDYWGQGTTVTVSSGGGGSGGGGSGGGGSGGGGSDVQLTQSPSFLSASVGDRVTITCRASKSISKDLAWYQQKPGKAPKLLIYSGSTLQSGVPSRFSGSGSGTEFTLTISSLQPEDFATYYCQQHNKYPYTFGGGTKVEIKTTTPAPRPPTPAPTIASQPLSLRPEACRPAAGGAVHTRGLDFACDIYIWAPLAGTCGVLLLSLVITLYCKRGRKKLLYIFKQPFMRPVQTTQEEDGCSCRFPEEEEGGCELRVKFSRSADAPAYKQGQNQLYNELNLGRREEYDVLDKRRGRDPEMGGKPRRKNPQEGLYNELQKDKMAEAYSEIGMKGERRRGKGHDGLYQGLSTATKDTYDALHMQALPPR

SEQ ID NO: 142 - protein, 486 aa, Artificial Sequence
  source: /note="Description of Artificial Sequence: Synthetic polypeptide"
MALPVTALLLPLALLLHAARPEVQLVQSGAEVKKPGESLRISCKGSGYTFTSYWMNWVRQMPGKGLEWMGRIDPYDSETHYNQKFKDHVTISVDKSISTAYLQWSSLKASDTAMYYCARGNWDDYWGQGTTVTVSSGGGGSGGGGSGGGGSGGGGSEVVLTQSPATLSLSPGERATLSCRASKSISKDLAWYQQKPGQAPRLLIYSGSTLQSGIPARFSGSGSGTDFTLTISSLEPEDFAVYYCQQHNKYPYTFGGGTKVEIKTTTPAPRPPTPAPTIASQPLSLRPEACRPAAGGAVHTRGLDFACDIYIWAPLAGTCGVLLLSLVITLYCKRGRKKLLYIFKQPFMRPVQTTQEEDGCSCRFPEEEEGGCELRVKFSRSADAPAYKQGQNQLYNELNLGRREEYDVLDKRRGRDPEMGGKPRRKNPQEGLYNELQKDKMAEAYSEIGMKGERRRGKGHDGLYQGLSTATKDTYDALHMQALPPR

SEQ ID NO: 143 - protein, 486 aa, Artificial Sequence
  source: /note="Description of Artificial Sequence: Synthetic polypeptide"
MALPVTALLLPLALLLHAARPEVQLVQSGAEVKKPGESLRISCKGSGYTFTSYWMNWVRQMPGKGLEWMGRIDPYDSETHYNQKFKDHVTISVDKSISTAYLQWSSLKASDTAMYYCARGNWDDYWGQGTTVTVSSGGGGSGGGGSGGGGSGGGGSDVVMTQSPAFLSVTPGEKVTITCRASKSISKDLAWYQQKPDQAPKLLIYSGSTLQSGVPSRFSGSGSGTDFTFTISSLEAEDAATYYCQQHNKYPYTFGGGTKVEIKTTTPAPRPPTPAPTIASQPLSLRPEACRPAAGGAVHTRGLDFACDIYIWAPLAGTCGVLLLSLVITLYCKRGRKKLLYIFKQPFMRPVQTTQEEDGCSCRFPEEEEGGCELRVKFSRSADAPAYKQGQNQLYNELNLGRREEYDVLDKRRGRDPEMGGKPRRKNPQEGLYNELQKDKMAEAYSEIGMKGERRRGKGHDGLYQGLSTATKDTYDALHMQALPPR

SEQ ID NO: 144 - protein, 486 aa, Artificial Sequence
  source: /note="Description of Artificial Sequence: Synthetic polypeptide"
MALPVTALLLPLALLLHAARPEVQLVQSGAEVKKPGESLRISCKGSGYTFTSYWMNWVRQMPGKGLEWMGRIDPYDSETHYNQKFKDHVTISVDKSISTAYLQWSSLKASDTAMYYCARGNWDDYWGQGTTVTVSSGGGGSGGGGSGGGGSGGGGSDVVMTQSPDSLAVSLGERATINCRASKSISKDLAWYQQKPGQPPKLLIYSGSTLQSGVPDRFSGSGSGTDFTLTISSLQAEDVAVYYCQQHNKYPYTFGGGTKVEIKTTTPAPRPPTPAPTIASQPLSLRPEACRPAAGGAVHTRGLDFACDIYIWAPLAGTCGVLLLSLVITLYCKRGRKKLLYIFKQPFMRPVQTTQEEDGCSCRFPEEEEGGCELRVKFSRSADAPAYKQGQNQLYNELNLGRREEYDVLDKRRGRDPEMGGKPRRKNPQEGLYNELQKDKMAEAYSEIGMKGERRRGKGHDGLYQGLSTATKDTYDALHMQALPPR

SEQ ID NO: 145 - protein, 486 aa, Artificial Sequence
  source: /note="Description of Artificial Sequence: Synthetic polypeptide"
MALPVTALLLPLALLLHAARPDVQLTQSPSFLSASVGDRVTITCRASKSISKDLAWYQQKPGKAPKLLIYSGSTLQSGVPSRFSGSGSGTEFTLTISSLQPEDFATYYCQQHNKYPYTFGGGTKVEIKGGGGSGGGGSGGGGSGGGGSEVQLVQSGAEVKKPGESLRISCKGSGYTFTSYWMNWVRQMPGKGLEWMGRIDPYDSETHYNQKFKDHVTISVDKSISTAYLQWSSLKASDTAMYYCARGNWDDYWGQGTTVTVSSTTTPAPRPPTPAPTIASQPLSLRPEACRPAAGGAVHTRGLDFACDIYIWAPLAGTCGVLLLSLVITLYCKRGRKKLLYIFKQPFMRPVQTTQEEDGCSCRFPEEEEGGCELRVKFSRSADAPAYKQGQNQLYNELNLGRREEYDVLDKRRGRDPEMGGKPRRKNPQEGLYNELQKDKMAEAYSEIGMKGERRRGKGHDGLYQGLSTATKDTYDALHMQALPPR

SEQ ID NO: 146 - protein, 486 aa, Artificial Sequence
  source: /note="Description of Artificial Sequence: Synthetic polypeptide"
MALPVTALLLPLALLLHAARPEVVLTQSPATLSLSPGERATLSCRASKSISKDLAWYQQKPGQAPRLLIYSGSTLQSGIPARFSGSGSGTDFTLTISSLEPEDFAVYYCQQHNKYPYTFGGGTKVEIKGGGGSGGGGSGGGGSGGGGSEVQLVQSGAEVKKPGESLRISCKGSGYTFTSYWMNWVRQMPGKGLEWMGRIDPYDSETHYNQKFKDHVTISVDKSISTAYLQWSSLKASDTAMYYCARGNWDDYWGQGTTVTVSSTTTPAPRPPTPAPTIASQPLSLRPEACRPAAGGAVHTRGLDFACDIYIWAPLAGTCGVLLLSLVITLYCKRGRKKLLYIFKQPFMRPVQTTQEEDGCSCRFPEEEEGGCELRVKFSRSADAPAYKQGQNQLYNELNLGRREEYDVLDKRRGRDPEMGGKPRRKNPQEGLYNELQKDKMAEAYSEIGMKGERRRGKGHDGLYQGLSTATKDTYDALHMQALPPR

SEQ ID NO: 147 - protein, 486 aa, Artificial Sequence
  source: /note="Description of Artificial Sequence: Synthetic polypeptide"
MALPVTALLLPLALLLHAARPDVVMTQSPAFLSVTPGEKVTITCRASKSISKDLAWYQQKPDQAPKLLIYSGSTLQSGVPSRFSGSGSGTDFTFTISSLEAEDAATYYCQQHNKYPYTFGGGTKVEIKGGGGSGGGGSGGGGSGGGGSEVQLVQSGAEVKKPGESLRISCKGSGYTFTSYWMNWVRQMPGKGLEWMGRIDPYDSETHYNQKFKDHVTISVDKSISTAYLQWSSLKASDTAMYYCARGNWDDYWGQGTTVTVSSTTTPAPRPPTPAPTIASQPLSLRPEACRPAAGGAVHTRGLDFACDIYIWAPLAGTCGVLLLSLVITLYCKRGRKKLLYIFKQPFMRPVQTTQEEDGCSCRFPEEEEGGCELRVKFSRSADAPAYKQGQNQLYNELNLGRREEYDVLDKRRGRDPEMGGKPRRKNPQEGLYNELQKDKMAEAYSEIGMKGERRRGKGHDGLYQGLSTATKDTYDALHMQALPPR

SEQ ID NO: 148 - protein, 486 aa, Artificial Sequence
  source: /note="Description of Artificial Sequence: Synthetic polypeptide"
MALPVTALLLPLALLLHAARPDVVMTQSPDSLAVSLGERATINCRASKSISKDLAWYQQKPGQPPKLLIYSGSTLQSGVPDRFSGSGSGTDFTLTISSLQAEDVAVYYCQQHNKYPYTFGGGTKVEIKGGGGSGGGGSGGGGSGGGGSEVQLVQSGAEVKKPGESLRISCKGSGYTFTSYWMNWVRQMPGKGLEWMGRIDPYDSETHYNQKFKDHVTISVDKSISTAYLQWSSLKASDTAMYYCARGNWDDYWGQGTTVTVSSTTTPAPRPPTPAPTIASQPLSLRPEACRPAAGGAVHTRGLDFACDIYIWAPLAGTCGVLLLSLVITLYCKRGRKKLLYIFKQPFMRPVQTTQEEDGCSCRFPEEEEGGCELRVKFSRSADAPAYKQGQNQLYNELNLGRREEYDVLDKRRGRDPEMGGKPRRKNPQEGLYNELQKDKMAEAYSEIGMKGERRRGKGHDGLYQGLSTATKDTYDALHMQALPPR

SEQ ID NO: 149 - protein, 486 aa, Artificial Sequence
  source: /note="Description of Artificial Sequence: Synthetic polypeptide"
MALPVTALLLPLALLLHAARPEVQLVESGGGLVQPGGSLRLSCAASGYTFTSYWMNWVRQAPGKGLVWVSRIDPYDSETHYNQKFKDRFTISVDKAKSTAYLQMNSLRAEDTAVYYCARGNWDDYWGQGTTVTVSSGGGGSGGGGSGGGGSGGGGSDVQLTQSPSFLSASVGDRVTITCRASKSISKDLAWYQQKPGKAPKLLIYSGSTLQSGVPSRFSGSGSGTEFTLTISSLQPEDFATYYCQQHNKYPYTFGGGTKVEIKTTTPAPRPPTPAPTIASQPLSLRPEACRPAAGGAVHTRGLDFACDIYIWAPLAGTCGVLLLSLVITLYCKRGRKKLLYIFKQPFMRPVQTTQEEDGCSCRFPEEEEGGCELRVKFSRSADAPAYKQGQNQLYNELNLGRREEYDVLDKRRGRDPEMGGKPRRKNPQEGLYNELQKDKMAEAYSEIGMKGERRRGKGHDGLYQGLSTATKDTYDALHMQALPPR

SEQ ID NO: 150 - protein, 486 aa, Artificial Sequence
  source: /note="Description of Artificial Sequence: Synthetic polypeptide"
MALPVTALLLPLALLLHAARPEVQLVESGGGLVQPGGSLRLSCAASGYTFTSYWMNWVRQAPGKGLVWVSRIDPYDSETHYNQKFKDRFTISVDKAKSTAYLQMNSLRAEDTAVYYCARGNWDDYWGQGTTVTVSSGGGGSGGGGSGGGGSGGGGSEVVLTQSPATLSLSPGERATLSCRASKSISKDLAWYQQKPGQAPRLLIYSGSTLQSGIPARFSGSGSGTDFTLTISSLEPEDFAVYYCQQHNKYPYTFGGGTKVEIKTTTPAPRPPTPAPTIASQPLSLRPEACRPAAGGAVHTRGLDFACDIYIWAPLAGTCGVLLLSLVITLYCKRGRKKLLYIFKQPFMRPVQTTQEEDGCSCRFPEEEEGGCELRVKFSRSADAPAYKQGQNQLYNELNLGRREEYDVLDKRRGRDPEMGGKPRRKNPQEGLYNELQKDKMAEAYSEIGMKGERRRGKGHDGLYQGLSTATKDTYDALHMQALPPR

SEQ ID NO: 151 - protein, 486 aa, Artificial Sequence
  source: /note="Description of Artificial Sequence: Synthetic polypeptide"
MALPVTALLLPLALLLHAARPEVQLVESGGGLVQPGGSLRLSCAASGYTFTSYWMNWVRQAPGKGLVWVSRIDPYDSETHYNQKFKDRFTISVDKAKSTAYLQMNSLRAEDTAVYYCARGNWDDYWGQGTTVTVSSGGGGSGGGGSGGGGSGGGGSDVVMTQSPAFLSVTPGEKVTITCRASKSISKDLAWYQQKPDQAPKLLIYSGSTLQSGVPSRFSGSGSGTDFTFTISSLEAEDAATYYCQQHNKYPYTFGGGTKVEIKTTTPAPRPPTPAPTIASQPLSLRPEACRPAAGGAVHTRGLDFACDIYIWAPLAGTCGVLLLSLVITLYCKRGRKKLLYIFKQPFMRPVQTTQEEDGCSCRFPEEEEGGCELRVKFSRSADAPAYKQGQNQLYNELNLGRREEYDVLDKRRGRDPEMGGKPRRKNPQEGLYNELQKDKMAEAYSEIGMKGERRRGKGHDGLYQGLSTATKDTYDALHMQALPPR

SEQ ID NO: 152 - protein, 486 aa, Artificial Sequence
  source: /note="Description of Artificial Sequence: Synthetic polypeptide"
MALPVTALLLPLALLLHAARPEVQLVESGGGLVQPGGSLRLSCAASGYTFTSYWMNWVRQAPGKGLVWVSRIDPYDSETHYNQKFKDRFTISVDKAKSTAYLQMNSLRAEDTAVYYCARGNWDDYWGQGTTVTVSSGGGGSGGGGSGGGGSGGGGSDVVMTQSPDSLAVSLGERATINCRASKSISKDLAWYQQKPGQPPKLLIYSGSTLQSGVPDRFSGSGSGTDFTLTISSLQAEDVAVYYCQQHNKYPYTFGGGTKVEIKTTTPAPRPPTPAPTIASQPLSLRPEACRPAAGGAVHTRGLDFACDIYIWAPLAGTCGVLLLSLVITLYCKRGRKKLLYIFKQPFMRPVQTTQEEDGCSCRFPEEEEGGCELRVKFSRSADAPAYKQGQNQLYNELNLGRREEYDVLDKRRGRDPEMGGKPRRKNPQEGLYNELQKDKMAEAYSEIGMKGERRRGKGHDGLYQGLSTATKDTYDALHMQALPPR

SEQ ID NO: 153 - protein, 486 aa, Artificial Sequence
  source: /note="Description of Artificial Sequence: Synthetic polypeptide"
MALPVTALLLPLALLLHAARPDVQLTQSPSFLSASVGDRVTITCRASKSISKDLAWYQQKPGKAPKLLIYSGSTLQSGVPSRFSGSGSGTEFTLTISSLQPEDFATYYCQQHNKYPYTFGGGTKVEIKGGGGSGGGGSGGGGSGGGGSEVQLVESGGGLVQPGGSLRLSCAASGYTFTSYWMNWVRQAPGKGLVWVSRIDPYDSETHYNQKFKDRFTISVDKAKSTAYLQMNSLRAEDTAVYYCARGNWDDYWGQGTTVTVSSTTTPAPRPPTPAPTIASQPLSLRPEACRPAAGGAVHTRGLDFACDIYIWAPLAGTCGVLLLSLVITLYCKRGRKKLLYIFKQPFMRPVQTTQEEDGCSCRFPEEEEGGCELRVKFSRSADAPAYKQGQNQLYNELNLGRREEYDVLDKRRGRDPEMGGKPRRKNPQEGLYNELQKDKMAEAYSEIGMKGERRRGKGHDGLYQGLSTATKDTYDALHMQALPPR

SEQ ID NO: 154 - protein, 486 aa, Artificial Sequence
  source: /note="Description of Artificial Sequence: Synthetic polypeptide"
MALPVTALLLPLALLLHAARPEVVLTQSPATLSLSPGERATLSCRASKSISKDLAWYQQKPGQAPRLLIYSGSTLQSGIPARFSGSGSGTDFTLTISSLEPEDFAVYYCQQHNKYPYTFGGGTKVEIKGGGGSGGGGSGGGGSGGGGSEVQLVESGGGLVQPGGSLRLSCAASGYTFTSYWMNWVRQAPGKGLVWVSRIDPYDSETHYNQKFKDRFTISVDKAKSTAYLQMNSLRAEDTAVYYCARGNWDDYWGQGTTVTVSSTTTPAPRPPTPAPTIASQPLSLRPEACRPAAGGAVHTRGLDFACDIYIWAPLAGTCGVLLLSLVITLYCKRGRKKLLYIFKQPFMRPVQTTQEEDGCSCRFPEEEEGGCELRVKFSRSADAPAYKQGQNQLYNELNLGRREEYDVLDKRRGRDPEMGGKPRRKNPQEGLYNELQKDKMAEAYSEIGMKGERRRGKGHDGLYQGLSTATKDTYDALHMQALPPR

SEQ ID NO: 155 - protein, 486 aa, Artificial Sequence
  source: /note="Description of Artificial Sequence: Synthetic polypeptide"
MALPVTALLLPLALLLHAARPDVVMTQSPAFLSVTPGEKVTITCRASKSISKDLAWYQQKPDQAPKLLIYSGSTLQSGVPSRFSGSGSGTDFTFTISSLEAEDAATYYCQQHNKYPYTFGGGTKVEIKGGGGSGGGGSGGGGSGGGGSEVQLVESGGGLVQPGGSLRLSCAASGYTFTSYWMNWVRQAPGKGLVWVSRIDPYDSETHYNQKFKDRFTISVDKAKSTAYLQMNSLRAEDTAVYYCARGNWDDYWGQGTTVTVSSTTTPAPRPPTPAPTIASQPLSLRPEACRPAAGGAVHTRGLDFACDIYIWAPLAGTCGVLLLSLVITLYCKRGRKKLLYIFKQPFMRPVQTTQEEDGCSCRFPEEEEGGCELRVKFSRSADAPAYKQGQNQLYNELNLGRREEYDVLDKRRGRDPEMGGKPRRKNPQEGLYNELQKDKMAEAYSEIGMKGERRRGKGHDGLYQGLSTATKDTYDALHMQALPPR

SEQ ID NO: 156 - protein, 486 aa, Artificial Sequence
  source: /note="Description of Artificial Sequence: Synthetic polypeptide"
MALPVTALLLPLALLLHAARPDVVMTQSPDSLAVSLGERATINCRASKSISKDLAWYQQKPGQPPKLLIYSGSTLQSGVPDRFSGSGSGTDFTLTISSLQAEDVAVYYCQQHNKYPYTFGGGTKVEIKGGGGSGGGGSGGGGSGGGGSEVQLVESGGGLVQPGGSLRLSCAASGYTFTSYWMNWVRQAPGKGLVWVSRIDPYDSETHYNQKFKDRFTISVDKAKSTAYLQMNSLRAEDTAVYYCARGNWDDYWGQGTTVTVSSTTTPAPRPPTPAPTIASQPLSLRPEACRPAAGGAVHTRGLDFACDIYIWAPLAGTCGVLLLSLVITLYCKRGRKKLLYIFKQPFMRPVQTTQEEDGCSCRFPEEEEGGCELRVKFSRSADAPAYKQGQNQLYNELNLGRREEYDVLDKRRGRDPEMGGKPRRKNPQEGLYNELQKDKMAEAYSEIGMKGERRRGKGHDGLYQGLSTATKDTYDALHMQALPPR

SEQ ID NO: 157 - protein, 264 aa, Artificial Sequence
  source: /note="Description of Artificial Sequence: Synthetic polypeptide"
MALPVTALLLPLALLLHAARPQVQLVQSGAEVKKPGASVKVSCKASGYTFTGYYMHWVRQAPGQGLEWMGWINPNSGGTNYAQKFQGRVTMTRDTSISTAYMELSRLRSDDTAVYYCARDMNILATVPFDIWGQGTMVTVSSGGGGSGGGGSGGGGSDIQMTQSPSSLSASVGDRVTITCRASQSISTYLNWYQQKPGKAPNLLIYAAFSLQSGVPSRFSGSGSGTDFTLTINSLQPEDFATYYCQQGDSVPLTFGGGTKLEIK

SEQ ID NO: 158 - protein, 264 aa, Artificial Sequence
  source: /note="Description of Artificial Sequence: Synthetic polypeptide"
MALPVTALLLPLALLLHAARPQVQLVQSGAEVKKPGASVKVSCKASGYTFTGYYMHWVRQAPGQGLEWMGWINPNSGGTNYAQKFQGRVTLTRDTSISTVYMELSRLRSDDTAVYYCARDMNILATVPFDIWGQGTMVTVSSGGGGSGGGGSGGGGSDIQMTQSPSSLSASVGDRVTITCRASQSISSYLNWYQQKPGKAPKLLIYAASSLQSGVPSRFSGSGSGTDFTLTVNSLQPEDFATYYCQQGDSVPLTFGGGTRLEIK

SEQ ID NO: 159 - protein, 264 aa, Artificial Sequence
  source: /note="Description of Artificial Sequence: Synthetic polypeptide"
MALPVTALLLPLALLLHAARPQVQLVQSGAEVKKPGASVKVSCKASGYIFTGYYIHWVRQAPGQGLEWMGWINPNSGGTNYAQKFQGRVTMTRDTSISTAYMELSGLRSDDPAVYYCARDMNILATVPFDIWGQGTLVTVSSGGGGSGGGGSGGGGSDIQLTQSPSSLSASVGDRVTITCRASQSISSYLNWYQQKPGKAPKLLIYAASSLQSGVPSRFSGSGSGTDFTLTVNSLQPEDFATYYCQQGDSVPLTFGGGTKVEIK

SEQ ID NO: 160 - protein, 266 aa, Artificial Sequence
  source: /note="Description of Artificial Sequence: Synthetic polypeptide"
MALPVTALLLPLALLLHAARPQVQLQQSGAEVKKSGASVKVSCKASGYTFTDYYMHWLRQAPGQGLEWMGWINPNSGDTNYAQKFQGRVTLTRDTSISTVYMELSRLRSDDTAVYYCARDMNILATVPFDIWGQGTMVTVSSASGGGGSGGRASGGGGSDIQMTQSPSSLSASVGDRVTITCRASQSISSYLNWYQQKPGKAPKLLIYAASSLQSGVPSRFSGSGSGTDFTLTISSLQPEDFATYYCQQGDSVPLTFGGGTKVEIK

SEQ ID NO: 161-183 - skipped (23 entries)

SEQ ID NO: 184 - protein, 263 aa, Artificial Sequence
  source: /note="Description of Artificial Sequence: Synthetic polypeptide"
MALPVTALLLPLALLLHAARPQVQLVQSGAEVKKPGASVKVSCKASGYTFTSYWMNWVRQAPGQGLEWMGRIDPYDSETHYNQKFKDRVTMTVDKSTSTAYMELSSLRSEDTAVYYCARGNWDDYWGQGTTVTVSSGGGGSGGGGSGGGGSGGGGSDVQLTQSPSFLSASVGDRVTITCRASKSISKDLAWYQQKPGKAPKLLIYSGSTLQSGVPSRFSGSGSGTEFTLTISSLQPEDFATYYCQQHNKYPYTFGGGTKVEIK

SEQ ID NO: 185 - protein, 263 aa, Artificial Sequence
  source: /note="Description of Artificial Sequence: Synthetic polypeptide"
MALPVTALLLPLALLLHAARPQVQLVQSGAEVKKPGASVKVSCKASGYTFTSYWMNWVRQAPGQGLEWMGRIDPYDSETHYNQKFKDRVTMTVDKSTSTAYMELSSLRSEDTAVYYCARGNWDDYWGQGTTVTVSSGGGGSGGGGSGGGGSGGGGSEVVLTQSPATLSLSPGERATLSCRASKSISKDLAWYQQKPGQAPRLLIYSGSTLQSGIPARFSGSGSGTDFTLTISSLEPEDFAVYYCQQHNKYPYTFGGGTKVEIK

SEQ ID NO: 186 - protein, 263 aa, Artificial Sequence
  source: /note="Description of Artificial Sequence: Synthetic polypeptide"
MALPVTALLLPLALLLHAARPQVQLVQSGAEVKKPGASVKVSCKASGYTFTSYWMNWVRQAPGQGLEWMGRIDPYDSETHYNQKFKDRVTMTVDKSTSTAYMELSSLRSEDTAVYYCARGNWDDYWGQGTTVTVSSGGGGSGGGGSGGGGSGGGGSDVVMTQSPAFLSVTPGEKVTITCRASKSISKDLAWYQQKPDQAPKLLIYSGSTLQSGVPSRFSGSGSGTDFTFTISSLEAEDAATYYCQQHNKYPYTFGGGTKVEIK

SEQ ID NO: 187 - protein, 263 aa, Artificial Sequence
  source: /note="Description of Artificial Sequence: Synthetic polypeptide"
MALPVTALLLPLALLLHAARPQVQLVQSGAEVKKPGASVKVSCKASGYTFTSYWMNWVRQAPGQGLEWMGRIDPYDSETHYNQKFKDRVTMTVDKSTSTAYMELSSLRSEDTAVYYCARGNWDDYWGQGTTVTVSSGGGGSGGGGSGGGGSGGGGSDVVMTQSPDSLAVSLGERATINCRASKSISKDLAWYQQKPGQPPKLLIYSGSTLQSGVPDRFSGSGSGTDFTLTISSLQAEDVAVYYCQQHNKYPYTFGGGTKVEIK

SEQ ID NO: 188 - protein, 263 aa, Artificial Sequence
  source: /note="Description of Artificial Sequence: Synthetic polypeptide"
MALPVTALLLPLALLLHAARPDVQLTQSPSFLSASVGDRVTITCRASKSISKDLAWYQQKPGKAPKLLIYSGSTLQSGVPSRFSGSGSGTEFTLTISSLQPEDFATYYCQQHNKYPYTFGGGTKVEIKGGGGSGGGGSGGGGSGGGGSQVQLVQSGAEVKKPGASVKVSCKASGYTFTSYWMNWVRQAPGQGLEWMGRIDPYDSETHYNQKFKDRVTMTVDKSTSTAYMELSSLRSEDTAVYYCARGNWDDYWGQGTTVTVSS

SEQ ID NO: 189 - protein, 263 aa, Artificial Sequence
  source: /note="Description of Artificial Sequence: Synthetic polypeptide"
MALPVTALLLPLALLLHAARPEVVLTQSPATLSLSPGERATLSCRASKSISKDLAWYQQKPGQAPRLLIYSGSTLQSGIPARFSGSGSGTDFTLTISSLEPEDFAVYYCQQHNKYPYTFGGGTKVEIKGGGGSGGGGSGGGGSGGGGSQVQLVQSGAEVKKPGASVKVSCKASGYTFTSYWMNWVRQAPGQGLEWMGRIDPYDSETHYNQKFKDRVTMTVDKSTSTAYMELSSLRSEDTAVYYCARGNWDDYWGQGTTVTVSS

SEQ ID NO: 190 - protein, 263 aa, Artificial Sequence
  source: /note="Description of Artificial Sequence: Synthetic polypeptide"
MALPVTALLLPLALLLHAARPDVVMTQSPAFLSVTPGEKVTITCRASKSISKDLAWYQQKPDQAPKLLIYSGSTLQSGVPSRFSGSGSGTDFTFTISSLEAEDAATYYCQQHNKYPYTFGGGTKVEIKGGGGSGGGGSGGGGSGGGGSQVQLVQSGAEVKKPGASVKVSCKASGYTFTSYWMNWVRQAPGQGLEWMGRIDPYDSETHYNQKFKDRVTMTVDKSTSTAYMELSSLRSEDTAVYYCARGNWDDYWGQGTTVTVSS

SEQ ID NO: 191 - protein, 263 aa, Artificial Sequence
  source: /note="Description of Artificial Sequence: Synthetic polypeptide"
MALPVTALLLPLALLLHAARPDVVMTQSPDSLAVSLGERATINCRASKSISKDLAWYQQKPGQPPKLLIYSGSTLQSGVPDRFSGSGSGTDFTLTISSLQAEDVAVYYCQQHNKYPYTFGGGTKVEIKGGGGSGGGGSGGGGSGGGGSQVQLVQSGAEVKKPGASVKVSCKASGYTFTSYWMNWVRQAPGQGLEWMGRIDPYDSETHYNQKFKDRVTMTVDKSTSTAYMELSSLRSEDTAVYYCARGNWDDYWGQGTTVTVSS

SEQ ID NO: 192 - protein, 263 aa, Artificial Sequence
  source: /note="Description of Artificial Sequence: Synthetic polypeptide"
MALPVTALLLPLALLLHAARPQVQLVQSGSELKKPGASVKVSCKASGYTFTSYWMNWVRQAPGQGLEWMGRIDPYDSETHYNQKFKDRFVFSVDKSVSTAYLQISSLKAEDTAVYYCARGNWDDYWGQGTTVTVSSGGGGSGGGGSGGGGSGGGGSDVQLTQSPSFLSASVGDRVTITCRASKSISKDLAWYQQKPGKAPKLLIYSGSTLQSGVPSRFSGSGSGTEFTLTISSLQPEDFATYYCQQHNKYPYTFGGGTKVEIK

SEQ ID NO: 193 - protein, 263 aa, Artificial Sequence
  source: /note="Description of Artificial Sequence: Synthetic polypeptide"
MALPVTALLLPLALLLHAARPQVQLVQSGSELKKPGASVKVSCKASGYTFTSYWMNWVRQAPGQGLEWMGRIDPYDSETHYNQKFKDRFVFSVDKSVSTAYLQISSLKAEDTAVYYCARGNWDDYWGQGTTVTVSSGGGGSGGGGSGGGGSGGGGSEVVLTQSPATLSLSPGERATLSCRASKSISKDLAWYQQKPGQAPRLLIYSGSTLQSGIPARFSGSGSGTDFTLTISSLEPEDFAVYYCQQHNKYPYTFGGGTKVEIK

SEQ ID NO: 194 - protein, 263 aa, Artificial Sequence
  source: /note="Description of Artificial Sequence: Synthetic polypeptide"
MALPVTALLLPLALLLHAARPQVQLVQSGSELKKPGASVKVSCKASGYTFTSYWMNWVRQAPGQGLEWMGRIDPYDSETHYNQKFKDRFVFSVDKSVSTAYLQISSLKAEDTAVYYCARGNWDDYWGQGTTVTVSSGGGGSGGGGSGGGGSGGGGSDVVMTQSPAFLSVTPGEKVTITCRASKSISKDLAWYQQKPDQAPKLLIYSGSTLQSGVPSRFSGSGSGTDFTFTISSLEAEDAATYYCQQHNKYPYTFGGGTKVEIK

SEQ ID NO: 195 - protein, 263 aa, Artificial Sequence
  source: /note="Description of Artificial Sequence: Synthetic polypeptide"
MALPVTALLLPLALLLHAARPQVQLVQSGSELKKPGASVKVSCKASGYTFTSYWMNWVRQAPGQGLEWMGRIDPYDSETHYNQKFKDRFVFSVDKSVSTAYLQISSLKAEDTAVYYCARGNWDDYWGQGTTVTVSSGGGGSGGGGSGGGGSGGGGSDVVMTQSPDSLAVSLGERATINCRASKSISKDLAWYQQKPGQPPKLLIYSGSTLQSGVPDRFSGSGSGTDFTLTISSLQAEDVAVYYCQQHNKYPYTFGGGTKVEIK

SEQ ID NO: 196 - protein, 263 aa, Artificial Sequence
  source: /note="Description of Artificial Sequence: Synthetic polypeptide"
MALPVTALLLPLALLLHAARPDVQLTQSPSFLSASVGDRVTITCRASKSISKDLAWYQQKPGKAPKLLIYSGSTLQSGVPSRFSGSGSGTEFTLTISSLQPEDFATYYCQQHNKYPYTFGGGTKVEIKGGGGSGGGGSGGGGSGGGGSQVQLVQSGSELKKPGASVKVSCKASGYTFTSYWMNWVRQAPGQGLEWMGRIDPYDSETHYNQKFKDRFVFSVDKSVSTAYLQISSLKAEDTAVYYCARGNWDDYWGQGTTVTVSS

SEQ ID NO: 197 - protein, 263 aa, Artificial Sequence
  source: /note="Description of Artificial Sequence: Synthetic polypeptide"
MALPVTALLLPLALLLHAARPEVVLTQSPATLSLSPGERATLSCRASKSISKDLAWYQQKPGQAPRLLIYSGSTLQSGIPARFSGSGSGTDFTLTISSLEPEDFAVYYCQQHNKYPYTFGGGTKVEIKGGGGSGGGGSGGGGSGGGGSQVQLVQSGSELKKPGASVKVSCKASGYTFTSYWMNWVRQAPGQGLEWMGRIDPYDSETHYNQKFKDRFVFSVDKSVSTAYLQISSLKAEDTAVYYCARGNWDDYWGQGTTVTVSS

SEQ ID NO: 198 - protein, 263 aa, Artificial Sequence
  source: /note="Description of Artificial Sequence: Synthetic polypeptide"
MALPVTALLLPLALLLHAARPDVVMTQSPAFLSVTPGEKVTITCRASKSISKDLAWYQQKPDQAPKLLIYSGSTLQSGVPSRFSGSGSGTDFTFTISSLEAEDAATYYCQQHNKYPYTFGGGTKVEIKGGGGSGGGGSGGGGSGGGGSQVQLVQSGSELKKPGASVKVSCKASGYTFTSYWMNWVRQAPGQGLEWMGRIDPYDSETHYNQKFKDRFVFSVDKSVSTAYLQISSLKAEDTAVYYCARGNWDDYWGQGTTVTVSS

SEQ ID NO: 199 - protein, 263 aa, Artificial Sequence
  source: /note="Description of Artificial Sequence: Synthetic polypeptide"
MALPVTALLLPLALLLHAARPDVVMTQSPDSLAVSLGERATINCRASKSISKDLAWYQQKPGQPPKLLIYSGSTLQSGVPDRFSGSGSGTDFTLTISSLQAEDVAVYYCQQHNKYPYTFGGGTKVEIKGGGGSGGGGSGGGGSGGGGSQVQLVQSGSELKKPGASVKVSCKASGYTFTSYWMNWVRQAPGQGLEWMGRIDPYDSETHYNQKFKDRFVFSVDKSVSTAYLQISSLKAEDTAVYYCARGNWDDYWGQGTTVTVSS

SEQ ID NO: 200 - protein, 263 aa, Artificial Sequence
  source: /note="Description of Artificial Sequence: Synthetic polypeptide"
MALPVTALLLPLALLLHAARPEVQLVQSGAEVKKPGESLRISCKGSGYTFTSYWMNWVRQMPGKGLEWMGRIDPYDSETHYNQKFKDHVTISVDKSISTAYLQWSSLKASDTAMYYCARGNWDDYWGQGTTVTVSSGGGGSGGGGSGGGGSGGGGSDVQLTQSPSFLSASVGDRVTITCRASKSISKDLAWYQQKPGKAPKLLIYSGSTLQSGVPSRFSGSGSGTEFTLTISSLQPEDFATYYCQQHNKYPYTFGGGTKVEIK

SEQ ID NO: 201 - protein, 263 aa, Artificial Sequence
  source: /note="Description of Artificial Sequence: Synthetic polypeptide"
MALPVTALLLPLALLLHAARPEVQLVQSGAEVKKPGESLRISCKGSGYTFTSYWMNWVRQMPGKGLEWMGRIDPYDSETHYNQKFKDHVTISVDKSISTAYLQWSSLKASDTAMYYCARGNWDDYWGQGTTVTVSSGGGGSGGGGSGGGGSGGGGSEVVLTQSPATLSLSPGERATLSCRASKSISKDLAWYQQKPGQAPRLLIYSGSTLQSGIPARFSGSGSGTDFTLTISSLEPEDFAVYYCQQHNKYPYTFGGGTKVEIK

SEQ ID NO: 202 - protein, 263 aa, Artificial Sequence
  source: /note="Description of Artificial Sequence: Synthetic polypeptide"
MALPVTALLLPLALLLHAARPEVQLVQSGAEVKKPGESLRISCKGSGYTFTSYWMNWVRQMPGKGLEWMGRIDPYDSETHYNQKFKDHVTISVDKSISTAYLQWSSLKASDTAMYYCARGNWDDYWGQGTTVTVSSGGGGSGGGGSGGGGSGGGGSDVVMTQSPAFLSVTPGEKVTITCRASKSISKDLAWYQQKPDQAPKLLIYSGSTLQSGVPSRFSGSGSGTDFTFTISSLEAEDAATYYCQQHNKYPYTFGGGTKVEIK

SEQ ID NO: 203 - protein, 263 aa, Artificial Sequence
  source: /note="Description of Artificial Sequence: Synthetic polypeptide"
MALPVTALLLPLALLLHAARPEVQLVQSGAEVKKPGESLRISCKGSGYTFTSYWMNWVRQMPGKGLEWMGRIDPYDSETHYNQKFKDHVTISVDKSISTAYLQWSSLKASDTAMYYCARGNWDDYWGQGTTVTVSSGGGGSGGGGSGGGGSGGGGSDVVMTQSPDSLAVSLGERATINCRASKSISKDLAWYQQKPGQPPKLLIYSGSTLQSGVPDRFSGSGSGTDFTLTISSLQAEDVAVYYCQQHNKYPYTFGGGTKVEIK

SEQ ID NO: 204 - protein, 263 aa, Artificial Sequence
  source: /note="Description of Artificial Sequence: Synthetic polypeptide"
MALPVTALLLPLALLLHAARPDVQLTQSPSFLSASVGDRVTITCRASKSISKDLAWYQQKPGKAPKLLIYSGSTLQSGVPSRFSGSGSGTEFTLTISSLQPEDFATYYCQQHNKYPYTFGGGTKVEIKGGGGSGGGGSGGGGSGGGGSEVQLVQSGAEVKKPGESLRISCKGSGYTFTSYWMNWVRQMPGKGLEWMGRIDPYDSETHYNQKFKDHVTISVDKSISTAYLQWSSLKASDTAMYYCARGNWDDYWGQGTTVTVSS

SEQ ID NO: 205 - protein, 263 aa, Artificial Sequence
  source: /note="Description of Artificial Sequence: Synthetic polypeptide"
MALPVTALLLPLALLLHAARPEVVLTQSPATLSLSPGERATLSCRASKSISKDLAWYQQKPGQAPRLLIYSGSTLQSGIPARFSGSGSGTDFTLTISSLEPEDFAVYYCQQHNKYPYTFGGGTKVEIKGGGGSGGGGSGGGGSGGGGSEVQLVQSGAEVKKPGESLRISCKGSGYTFTSYWMNWVRQMPGKGLEWMGRIDPYDSETHYNQKFKDHVTISVDKSISTAYLQWSSLKASDTAMYYCARGNWDDYWGQGTTVTVSS

SEQ ID NO: 206 - protein, 263 aa, Artificial Sequence
  source: /note="Description of Artificial Sequence: Synthetic polypeptide"
MALPVTALLLPLALLLHAARPDVVMTQSPAFLSVTPGEKVTITCRASKSISKDLAWYQQKPDQAPKLLIYSGSTLQSGVPSRFSGSGSGTDFTFTISSLEAEDAATYYCQQHNKYPYTFGGGTKVEIKGGGGSGGGGSGGGGSGGGGSEVQLVQSGAEVKKPGESLRISCKGSGYTFTSYWMNWVRQMPGKGLEWMGRIDPYDSETHYNQKFKDHVTISVDKSISTAYLQWSSLKASDTAMYYCARGNWDDYWGQGTTVTVSS

SEQ ID NO: 207 - protein, 263 aa, Artificial Sequence
  source: /note="Description of Artificial Sequence: Synthetic polypeptide"
MALPVTALLLPLALLLHAARPDVVMTQSPDSLAVSLGERATINCRASKSISKDLAWYQQKPGQPPKLLIYSGSTLQSGVPDRFSGSGSGTDFTLTISSLQAEDVAVYYCQQHNKYPYTFGGGTKVEIKGGGGSGGGGSGGGGSGGGGSEVQLVQSGAEVKKPGESLRISCKGSGYTFTSYWMNWVRQMPGKGLEWMGRIDPYDSETHYNQKFKDHVTISVDKSISTAYLQWSSLKASDTAMYYCARGNWDDYWGQGTTVTVSS

SEQ ID NO: 208 - protein, 263 aa, Artificial Sequence
  source: /note="Description of Artificial Sequence: Synthetic polypeptide"
MALPVTALLLPLALLLHAARPEVQLVESGGGLVQPGGSLRLSCAASGYTFTSYWMNWVRQAPGKGLVWVSRIDPYDSETHYNQKFKDRFTISVDKAKSTAYLQMNSLRAEDTAVYYCARGNWDDYWGQGTTVTVSSGGGGSGGGGSGGGGSGGGGSDVQLTQSPSFLSASVGDRVTITCRASKSISKDLAWYQQKPGKAPKLLIYSGSTLQSGVPSRFSGSGSGTEFTLTISSLQPEDFATYYCQQHNKYPYTFGGGTKVEIK

SEQ ID NO: 209 - protein, 263 aa, Artificial Sequence
  source: /note="Description of Artificial Sequence: Synthetic polypeptide"
MALPVTALLLPLALLLHAARPEVQLVESGGGLVQPGGSLRLSCAASGYTFTSYWMNWVRQAPGKGLVWVSRIDPYDSETHYNQKFKDRFTISVDKAKSTAYLQMNSLRAEDTAVYYCARGNWDDYWGQGTTVTVSSGGGGSGGGGSGGGGSGGGGSEVVLTQSPATLSLSPGERATLSCRASKSISKDLAWYQQKPGQAPRLLIYSGSTLQSGIPARFSGSGSGTDFTLTISSLEPEDFAVYYCQQHNKYPYTFGGGTKVEIK

SEQ ID NO: 210 - protein, 263 aa, Artificial Sequence
  source: /note="Description of Artificial Sequence: Synthetic polypeptide"
MALPVTALLLPLALLLHAARPEVQLVESGGGLVQPGGSLRLSCAASGYTFTSYWMNWVRQAPGKGLVWVSRIDPYDSETHYNQKFKDRFTISVDKAKSTAYLQMNSLRAEDTAVYYCARGNWDDYWGQGTTVTVSSGGGGSGGGGSGGGGSGGGGSDVVMTQSPAFLSVTPGEKVTITCRASKSISKDLAWYQQKPDQAPKLLIYSGSTLQSGVPSRFSGSGSGTDFTFTISSLEAEDAATYYCQQHNKYPYTFGGGTKVEIK

SEQ ID NO: 211 - protein, 263 aa, Artificial Sequence
  source: /note="Description of Artificial Sequence: Synthetic polypeptide"
MALPVTALLLPLALLLHAARPEVQLVESGGGLVQPGGSLRLSCAASGYTFTSYWMNWVRQAPGKGLVWVSRIDPYDSETHYNQKFKDRFTISVDKAKSTAYLQMNSLRAEDTAVYYCARGNWDDYWGQGTTVTVSSGGGGSGGGGSGGGGSGGGGSDVVMTQSPDSLAVSLGERATINCRASKSISKDLAWYQQKPGQPPKLLIYSGSTLQSGVPDRFSGSGSGTDFTLTISSLQAEDVAVYYCQQHNKYPYTFGGGTKVEIK

SEQ ID NO: 212 - protein, 263 aa, Artificial Sequence
  source: /note="Description of Artificial Sequence: Synthetic polypeptide"
MALPVTALLLPLALLLHAARPDVQLTQSPSFLSASVGDRVTITCRASKSISKDLAWYQQKPGKAPKLLIYSGSTLQSGVPSRFSGSGSGTEFTLTISSLQPEDFATYYCQQHNKYPYTFGGGTKVEIKGGGGSGGGGSGGGGSGGGGSEVQLVESGGGLVQPGGSLRLSCAASGYTFTSYWMNWVRQAPGKGLVWVSRIDPYDSETHYNQKFKDRFTISVDKAKSTAYLQMNSLRAEDTAVYYCARGNWDDYWGQGTTVTVSS

SEQ ID NO: 213 - protein, 263 aa, Artificial Sequence
  source: /note="Description of Artificial Sequence: Synthetic polypeptide"
MALPVTALLLPLALLLHAARPEVVLTQSPATLSLSPGERATLSCRASKSISKDLAWYQQKPGQAPRLLIYSGSTLQSGIPARFSGSGSGTDFTLTISSLEPEDFAVYYCQQHNKYPYTFGGGTKVEIKGGGGSGGGGSGGGGSGGGGSEVQLVESGGGLVQPGGSLRLSCAASGYTFTSYWMNWVRQAPGKGLVWVSRIDPYDSETHYNQKFKDRFTISVDKAKSTAYLQMNSLRAEDTAVYYCARGNWDDYWGQGTTVTVSS

SEQ ID NO: 214 - protein, 263 aa, Artificial Sequence
  source: /note="Description of Artificial Sequence: Synthetic polypeptide"
MALPVTALLLPLALLLHAARPDVVMTQSPAFLSVTPGEKVTITCRASKSISKDLAWYQQKPDQAPKLLIYSGSTLQSGVPSRFSGSGSGTDFTFTISSLEAEDAATYYCQQHNKYPYTFGGGTKVEIKGGGGSGGGGSGGGGSGGGGSEVQLVESGGGLVQPGGSLRLSCAASGYTFTSYWMNWVRQAPGKGLVWVSRIDPYDSETHYNQKFKDRFTISVDKAKSTAYLQMNSLRAEDTAVYYCARGNWDDYWGQGTTVTVSS

SEQ ID NO: 215 - protein, 263 aa, Artificial Sequence
  source: /note="Description of Artificial Sequence: Synthetic polypeptide"
MALPVTALLLPLALLLHAARPDVVMTQSPDSLAVSLGERATINCRASKSISKDLAWYQQKPGQPPKLLIYSGSTLQSGVPDRFSGSGSGTDFTLTISSLQAEDVAVYYCQQHNKYPYTFGGGTKVEIKGGGGSGGGGSGGGGSGGGGSEVQLVESGGGLVQPGGSLRLSCAASGYTFTSYWMNWVRQAPGKGLVWVSRIDPYDSETHYNQKFKDRFTISVDKAKSTAYLQMNSLRAEDTAVYYCARGNWDDYWGQGTTVTVSS

SEQ ID NO: 216 - protein, 121 aa, Artificial Sequence
  source: /note="Description of Artificial Sequence: Synthetic polypeptide"
QVQLVQSGAEVKKPGASVKVSCKASGYTFTGYYMHWVRQAPGQGLEWMGWINPNSGGTNYAQKFQGRVTMTRDTSISTAYMELSRLRSDDTAVYYCARDMNILATVPFDIWGQGTMVTVSS

SEQ ID NO: 217 - protein, 121 aa, Artificial Sequence
  source: /note="Description of Artificial Sequence: Synthetic polypeptide"
QVQLVQSGAEVKKPGASVKVSCKASGYTFTGYYMHWVRQAPGQGLEWMGWINPNSGGTNYAQKFQGRVTLTRDTSISTVYMELSRLRSDDTAVYYCARDMNILATVPFDIWGQGTMVTVSS

SEQ ID NO: 218 - protein, 121 aa, Artificial Sequence
  source: /note="Description of Artificial Sequence: Synthetic polypeptide"
QVQLVQSGAEVKKPGASVKVSCKASGYIFTGYYIHWVRQAPGQGLEWMGWINPNSGGTNYAQKFQGRVTMTRDTSISTAYMELSGLRSDDPAVYYCARDMNILATVPFDIWGQGTLVTVSS

SEQ ID NO: 219 - protein, 121 aa, Artificial Sequence
  source: /note="Description of Artificial Sequence: Synthetic polypeptide"
QVQLQQSGAEVKKSGASVKVSCKASGYTFTDYYMHWLRQAPGQGLEWMGWINPNSGDTNYAQKFQGRVTLTRDTSISTVYMELSRLRSDDTAVYYCARDMNILATVPFDIWGQGTMVTVSS

SEQ ID NO: 220-242 - skipped (23 entries)

SEQ ID NO: 243 - protein, 115 aa, Artificial Sequence
  source: /note="Description of Artificial Sequence: Synthetic polypeptide"
QVQLVQSGAEVKKPGASVKVSCKASGYTFTSYWMNWVRQAPGQGLEWMGRIDPYDSETHYNQKFKDRVTMTVDKSTSTAYMELSSLRSEDTAVYYCARGNWDDYWGQGTTVTVSS

SEQ ID NO: 244 - protein, 115 aa, Artificial Sequence; identical to SEQ ID NO: 243
  source: /note="Description of Artificial Sequence: Synthetic polypeptide"

SEQ ID NO: 245 - protein, 115 aa, Artificial Sequence; identical to SEQ ID NO: 243
  source: /note="Description of Artificial Sequence: Synthetic polypeptide"

SEQ ID NO: 246 - protein, 115 aa, Artificial Sequence; identical to SEQ ID NO: 243
  source: /note="Description of Artificial Sequence: Synthetic polypeptide"

SEQ ID NO: 247 - protein, 115 aa, Artificial Sequence; identical to SEQ ID NO: 243
  source: /note="Description of Artificial Sequence: Synthetic polypeptide"

SEQ ID NO: 248 - protein, 115 aa, Artificial Sequence; identical to SEQ ID NO: 243
  source: /note="Description of Artificial Sequence: Synthetic polypeptide"

SEQ ID NO: 249 - protein, 115 aa, Artificial Sequence; identical to SEQ ID NO: 243
  source: /note="Description of Artificial Sequence: Synthetic polypeptide"

SEQ ID NO: 250 - protein, 115 aa, Artificial Sequence; identical to SEQ ID NO: 243
  source: /note="Description of Artificial Sequence: Synthetic polypeptide"

SEQ ID NO: 251 - protein, 115 aa, Artificial Sequence
  source: /note="Description of Artificial Sequence: Synthetic polypeptide"
QVQLVQSGSELKKPGASVKVSCKASGYTFTSYWMNWVRQAPGQGLEWMGRIDPYDSETHYNQKFKDRFVFSVDKSVSTAYLQISSLKAEDTAVYYCARGNWDDYWGQGTTVTVSS

SEQ ID NO: 252 - protein, 115 aa, Artificial Sequence; identical to SEQ ID NO: 251
  source: /note="Description of Artificial Sequence: Synthetic polypeptide"

SEQ ID NO: 253 - protein, 115 aa, Artificial Sequence; identical to SEQ ID NO: 251
  source: /note="Description of Artificial Sequence: Synthetic polypeptide"

SEQ ID NO: 254 - protein, 115 aa, Artificial Sequence; identical to SEQ ID NO: 251
  source: /note="Description of Artificial Sequence: Synthetic polypeptide"

SEQ ID NO: 255 - protein, 115 aa, Artificial Sequence; identical to SEQ ID NO: 251
  source: /note="Description of Artificial Sequence: Synthetic polypeptide"

SEQ ID NO: 256 - protein, 115 aa, Artificial Sequence; identical to SEQ ID NO: 251
  source: /note="Description of Artificial Sequence: Synthetic polypeptide"

SEQ ID NO: 257 - protein, 115 aa, Artificial Sequence; identical to SEQ ID NO: 251
  source: /note="Description of Artificial Sequence: Synthetic polypeptide"

SEQ ID NO: 258 - protein, 115 aa, Artificial Sequence; identical to SEQ ID NO: 251
  source: /note="Description of Artificial Sequence: Synthetic polypeptide"

SEQ ID NO: 259 - protein, 115 aa, Artificial Sequence
  source: /note="Description of Artificial Sequence: Synthetic polypeptide"
EVQLVQSGAEVKKPGESLRISCKGSGYTFTSYWMNWVRQMPGKGLEWMGRIDPYDSETHYNQKFKDHVTISVDKSISTAYLQWSSLKASDTAMYYCARGNWDDYWGQGTTVTVSS

SEQ ID NO: 260 - protein, 115 aa, Artificial Sequence; identical to SEQ ID NO: 259
  source: /note="Description of Artificial Sequence: Synthetic polypeptide"

SEQ ID NO: 261 - protein, 115 aa, Artificial Sequence; identical to SEQ ID NO: 259
  source: /note="Description of Artificial Sequence: Synthetic polypeptide"

SEQ ID NO: 262 - protein, 115 aa, Artificial Sequence; identical to SEQ ID NO: 259
  source: /note="Description of Artificial Sequence: Synthetic polypeptide"

SEQ ID NO: 263 - protein, 115 aa, Artificial Sequence; identical to SEQ ID NO: 259
  source: /note="Description of Artificial Sequence: Synthetic polypeptide"

SEQ ID NO: 264 - protein, 115 aa, Artificial Sequence; identical to SEQ ID NO: 259
  source: /note="Description of Artificial Sequence: Synthetic polypeptide"

SEQ ID NO: 265 - protein, 115 aa, Artificial Sequence; identical to SEQ ID NO: 259
  source: /note="Description of Artificial Sequence: Synthetic polypeptide"

SEQ ID NO: 266 - protein, 115 aa, Artificial Sequence; identical to SEQ ID NO: 259
  source: /note="Description of Artificial Sequence: Synthetic polypeptide"

SEQ ID NO: 267 - protein, 115 aa, Artificial Sequence
  source: /note="Description of Artificial Sequence: Synthetic polypeptide"
EVQLVESGGGLVQPGGSLRLSCAASGYTFTSYWMNWVRQAPGKGLVWVSRIDPYDSETHYNQKFKDRFTISVDKAKSTAYLQMNSLRAEDTAVYYCARGNWDDYWGQGTTVTVSS

SEQ ID NO: 268 - protein, 115 aa, Artificial Sequence; identical to SEQ ID NO: 267
  source: /note="Description of Artificial Sequence: Synthetic polypeptide"

SEQ ID NO: 269 - protein, 115 aa, Artificial Sequence; identical to SEQ ID NO: 267
  source: /note="Description of Artificial Sequence: Synthetic polypeptide"

SEQ ID NO: 270 - protein, 115 aa, Artificial Sequence; identical to SEQ ID NO: 267
  source: /note="Description of Artificial Sequence: Synthetic polypeptide"

SEQ ID NO: 271 - protein, 115 aa, Artificial Sequence; identical to SEQ ID NO: 267
  source: /note="Description of Artificial Sequence: Synthetic polypeptide"

SEQ ID NO: 272 - protein, 115 aa, Artificial Sequence; identical to SEQ ID NO: 267
  source: /note="Description of Artificial Sequence: Synthetic polypeptide"

SEQ ID NO: 273 - protein, 115 aa, Artificial Sequence; identical to SEQ ID NO: 267
  source: /note="Description of Artificial Sequence: Synthetic polypeptide"

SEQ ID NO: 274 - protein, 115 aa, Artificial Sequence; identical to SEQ ID NO: 267
  source: /note="Description of Artificial Sequence: Synthetic polypeptide"

SEQ ID NO: 275 - protein, 107 aa, Artificial Sequence
  source: /note="Description of Artificial Sequence: Synthetic polypeptide"
DIQMTQSPSSLSASVGDRVTITCRASQSISTYLNWYQQKPGKAPNLLIYAAFSLQSGVPSRFSGSGSGTDFTLTINSLQPEDFATYYCQQGDSVPLTFGGGTKLEIK

SEQ ID NO: 276 - protein, 107 aa, Artificial Sequence
  source: /note="Description of Artificial Sequence: Synthetic polypeptide"
DIQMTQSPSSLSASVGDRVTITCRASQSISSYLNWYQQKPGKAPKLLIYAASSLQSGVPSRFSGSGSGTDFTLTVNSLQPEDFATYYCQQGDSVPLTFGGGTRLEIK

SEQ ID NO: 277 - protein, 107 aa, Artificial Sequence
  source: /note="Description of Artificial Sequence: Synthetic polypeptide"
DIQLTQSPSSLSASVGDRVTITCRASQSISSYLNWYQQKPGKAPKLLIYAASSLQSGVPSRFSGSGSGTDFTLTVNSLQPEDFATYYCQQGDSVPLTFGGGTKVEIK

SEQ ID NO: 278 - protein, 107 aa, Artificial Sequence
  source: /note="Description of Artificial Sequence: Synthetic polypeptide"
DIQMTQSPSSLSASVGDRVTITCRASQSISSYLNWYQQKPGKAPKLLIYAASSLQSGVPSRFSGSGSGTDFTLTISSLQPEDFATYYCQQGDSVPLTFGGGTKVEIK

SEQ ID NO: 279-301 - skipped (23 entries)

SEQ ID NO: 302 - protein, 107 aa, Artificial Sequence
  source: /note="Description of Artificial Sequence: Synthetic polypeptide"
DVQLTQSPSFLSASVGDRVTITCRASKSISKDLAWYQQKPGKAPKLLIYSGSTLQSGVPSRFSGSGSGTEFTLTISSLQPEDFATYYCQQHNKYPYTFGGGTKVEIK

SEQ ID NO: 303 - protein, 107 aa, Artificial Sequence
  source: /note="Description of Artificial Sequence: Synthetic polypeptide"
EVVLTQSPATLSLSPGERATLSCRASKSISKDLAWYQQKPGQAPRLLIYSGSTLQSGIPARFSGSGSGTDFTLTISSLEPEDFAVYYCQQHNKYPYTFGGGTKVEIK

SEQ ID NO: 304 - protein, 107 aa, Artificial Sequence
  source: /note="Description of Artificial Sequence: Synthetic polypeptide"
DVVMTQSPAFLSVTPGEKVTITCRASKSISKDLAWYQQKPDQAPKLLIYSGSTLQSGVPSRFSGSGSGTDFTFTISSLEAEDAATYYCQQHNKYPYTFGGGTKVEIK

SEQ ID NO: 305 - protein, 107 aa, Artificial Sequence
  source: /note="Description of Artificial Sequence: Synthetic polypeptide"
DVVMTQSPDSLAVSLGERATINCRASKSISKDLAWYQQKPGQPPKLLIYSGSTLQSGVPDRFSGSGSGTDFTLTISSLQAEDVAVYYCQQHNKYPYTFGGGTKVEIK

SEQ ID NO: 306 - protein, 107 aa, Artificial Sequence; identical to SEQ ID NO: 302
  source: /note="Description of Artificial Sequence: Synthetic polypeptide"

SEQ ID NO: 307 - protein, 107 aa, Artificial Sequence; identical to SEQ ID NO: 303
  source: /note="Description of Artificial Sequence: Synthetic polypeptide"

SEQ ID NO: 308 - protein, 107 aa, Artificial Sequence; identical to SEQ ID NO: 304
  source: /note="Description of Artificial Sequence: Synthetic polypeptide"

SEQ ID NO: 309 - protein, 107 aa, Artificial Sequence; identical to SEQ ID NO: 305
  source: /note="Description of Artificial Sequence: Synthetic polypeptide"

SEQ ID NO: 310 - protein, 107 aa, Artificial Sequence; identical to SEQ ID NO: 302
  source: /note="Description of Artificial Sequence: Synthetic polypeptide"

SEQ ID NO: 311 - protein, 107 aa, Artificial Sequence; identical to SEQ ID NO: 303
  source: /note="Description of Artificial Sequence: Synthetic polypeptide"

SEQ ID NO: 312 - protein, 107 aa, Artificial Sequence; identical to SEQ ID NO: 304
  source: /note="Description of Artificial Sequence: Synthetic polypeptide"

SEQ ID NO: 313 - protein, 107 aa, Artificial Sequence; identical to SEQ ID NO: 305
  source: /note="Description of Artificial Sequence: Synthetic polypeptide"

SEQ ID NO: 314 - protein, 107 aa, Artificial Sequence; identical to SEQ ID NO: 302
  source: /note="Description of Artificial Sequence: Synthetic polypeptide"

SEQ ID NO: 315 - protein, 107 aa, Artificial Sequence; identical to SEQ ID NO: 303
  source: /note="Description of Artificial Sequence: Synthetic polypeptide"

SEQ ID NO: 316 - protein, 107 aa, Artificial Sequence; identical to SEQ ID NO: 304
  source: /note="Description of Artificial Sequence: Synthetic polypeptide"

SEQ ID NO: 317 - protein, 107 aa, Artificial Sequence; identical to SEQ ID NO: 305
  source: /note="Description of Artificial Sequence: Synthetic polypeptide"

SEQ ID NO: 318 - protein, 107 aa, Artificial Sequence; identical to SEQ ID NO: 302
  source: /note="Description of Artificial Sequence: Synthetic polypeptide"

SEQ ID NO: 319 - protein, 107 aa, Artificial Sequence; identical to SEQ ID NO: 303
  source: /note="Description of Artificial Sequence: Synthetic polypeptide"

SEQ ID NO: 320 - protein, 107 aa, Artificial Sequence; identical to SEQ ID NO: 304
  source: /note="Description of Artificial Sequence: Synthetic polypeptide"

SEQ ID NO: 321 - protein, 107 aa, Artificial Sequence; identical to SEQ ID NO: 305
  source: /note="Description of Artificial Sequence: Synthetic polypeptide"

SEQ ID NO: 322 - protein, 107 aa, Artificial Sequence; identical to SEQ ID NO: 302
  source: /note="Description of Artificial Sequence: Synthetic polypeptide"

SEQ ID NO: 323 - protein, 107 aa, Artificial Sequence; identical to SEQ ID NO: 303
  source: /note="Description of Artificial Sequence: Synthetic polypeptide"

SEQ ID NO: 324 - protein, 107 aa, Artificial Sequence; identical to SEQ ID NO: 304
  source: /note="Description of Artificial Sequence: Synthetic polypeptide"

SEQ ID NO: 325 - protein, 107 aa, Artificial Sequence; identical to SEQ ID NO: 305
  source: /note="Description of Artificial Sequence: Synthetic polypeptide"

SEQ ID NO: 326 - protein, 107 aa, Artificial Sequence; identical to SEQ ID NO: 302
  source: /note="Description of Artificial Sequence: Synthetic polypeptide"

SEQ ID NO: 327 - protein, 107 aa, Artificial Sequence; identical to SEQ ID NO: 303
  source: /note="Description of Artificial Sequence: Synthetic polypeptide"

SEQ ID NO: 328 - protein, 107 aa, Artificial Sequence; identical to SEQ ID NO: 304
  source: /note="Description of Artificial Sequence: Synthetic polypeptide"

SEQ ID NO: 329 - protein, 107 aa, Artificial Sequence; identical to SEQ ID NO: 305
  source: /note="Description of Artificial Sequence: Synthetic polypeptide"

SEQ ID NO: 330 - protein, 107 aa, Artificial Sequence; identical to SEQ ID NO: 302
  source: /note="Description of Artificial Sequence: Synthetic polypeptide"

SEQ ID NO: 331 - protein, 107 aa, Artificial Sequence; identical to SEQ ID NO: 303
  source: /note="Description of Artificial Sequence: Synthetic polypeptide"

SEQ ID NO: 332 - protein, 107 aa, Artificial Sequence; identical to SEQ ID NO: 304
  source: /note="Description of Artificial Sequence: Synthetic polypeptide"

SEQ ID NO: 333 - protein, 107 aa, Artificial Sequence; identical to SEQ ID NO: 305
  source: /note="Description of Artificial Sequence: Synthetic polypeptide"

SEQ ID NO: 334 - protein, 10 aa, Artificial Sequence
  source: /note="Description of Artificial Sequence: Synthetic peptide"
GYTFTDYYMH

SEQ ID NO: 335 - protein, 10 aa, Artificial Sequence
  source: /note="Description of Artificial Sequence: Synthetic peptide"
GYTFTGYYMH

SEQ ID NO: 336 - protein, 10 aa, Artificial Sequence
  source: /note="Description of Artificial Sequence: Synthetic peptide"
GYTFTGYYMH

SEQ ID NO: 337 - protein, 10 aa, Artificial Sequence
  source: /note="Description of Artificial Sequence: Synthetic peptide"
GYIFTGYYIH

SEQ ID NO: 338-360 - skipped (23 entries)

SEQ ID NO: 361 - protein, 10 aa, Artificial Sequence
  source: /note="Description of Artificial Sequence: Synthetic peptide"
GYTFTSYWMN

SEQ ID NO: 362 - protein, 17 aa, Artificial Sequence
  source: /note="Description of Artificial Sequence: Synthetic peptide"
WINPNSGDTNYAQKFQG

SEQ ID NO: 363 - protein, 17 aa, Artificial Sequence
  source: /note="Description of Artificial Sequence: Synthetic peptide"
WINPNSGGTNYAQKFQG

SEQ ID NO: 364 - protein, 17 aa, Artificial Sequence
  source: /note="Description of Artificial Sequence: Synthetic peptide"
WINPNSGGTNYAQKFQG

SEQ ID NO: 365 - protein, 17 aa, Artificial Sequence
  source: /note="Description of Artificial Sequence: Synthetic peptide"
WINPNSGGTNYAQKFQG

SEQ ID NO: 366-388 - skipped (23 entries)

SEQ ID NO: 389 - protein, 17 aa, Artificial Sequence
  source: /note="Description of Artificial Sequence: Synthetic peptide"
RIDPYDSETHYNQKFKD

SEQ ID NO: 390 - protein, 12 aa, Artificial Sequence
  source: /note="Description of Artificial Sequence: Synthetic peptide"
DMNILATVPFDI

SEQ ID NO: 391 - protein, 12 aa, Artificial Sequence
  source: /note="Description of Artificial Sequence: Synthetic peptide"
DMNILATVPFDI

SEQ ID NO: 392 - protein, 12 aa, Artificial Sequence
  source: /note="Description of Artificial Sequence: Synthetic peptide"
DMNILATVPFDI

SEQ ID NO: 393 - protein, 12 aa, Artificial Sequence
  source: /note="Description of Artificial Sequence: Synthetic peptide"
DMNILATVPFDI

SEQ ID NO: 394-416 - skipped (23 entries)

SEQ ID NO: 417 - protein, 6 aa, Artificial Sequence
  source: /note="Description of Artificial Sequence: Synthetic peptide"
GNWDDY

SEQ ID NO: 418 - protein, 11 aa, Artificial Sequence
  source: /note="Description of Artificial Sequence: Synthetic peptide"
RASQSISTYLN

SEQ ID NO: 419 - protein, 11 aa, Artificial Sequence
  source: /note="Description of Artificial Sequence: Synthetic peptide"
RASQSISSYLN

SEQ ID NO: 420 - protein, 11 aa, Artificial Sequence
  source: /note="Description of Artificial Sequence: Synthetic peptide"
RASQSISSYLN

SEQ ID NO: 421 - protein, 11 aa, Artificial Sequence
  source: /note="Description of Artificial Sequence: Synthetic peptide"
RASQSISSYLN

SEQ ID NO: 422-444 - skipped (23 entries)

SEQ ID NO: 445 - protein, 11 aa, Artificial Sequence
  source: /note="Description of Artificial Sequence: Synthetic peptide"
RASKSISKDLA

SEQ ID NO: 446 - protein, 7 aa, Artificial Sequence
  source: /note="Description of Artificial Sequence: Synthetic peptide"
AASSLQS

SEQ ID NO: 447 - protein, 7 aa, Artificial Sequence
  source: /note="Description of Artificial Sequence: Synthetic peptide"
AAFSLQS

SEQ ID NO: 448 - protein, 7 aa, Artificial Sequence
  source: /note="Description of Artificial Sequence: Synthetic peptide"
AASSLQS

SEQ ID NO: 449 - protein, 7 aa, Artificial Sequence
  source: /note="Description of Artificial Sequence: Synthetic peptide"
AASSLQS

SEQ ID NO: 450-472 - skipped (23 entries)

SEQ ID NO: 473 - protein, 7 aa, Artificial Sequence
  source: /note="Description of Artificial Sequence: Synthetic peptide"
SGSTLQS

SEQ ID NO: 474 - protein, 9 aa, Artificial Sequence
  source: /note="Description of Artificial Sequence: Synthetic peptide"
QQGDSVPLT

SEQ ID NO: 475 - protein, 9 aa, Artificial Sequence
  source: /note="Description of Artificial Sequence: Synthetic peptide"
QQGDSVPLT

SEQ ID NO: 476 - protein, 9 aa, Artificial Sequence
  source: /note="Description of Artificial Sequence: Synthetic peptide"
QQGDSVPLT

SEQ ID NO: 477 - protein, 9 aa, Artificial Sequence
  source: /note="Description of Artificial Sequence: Synthetic peptide"
QQGDSVPLT

SEQ ID NO: 478 - protein, 243 aa, Artificial Sequence
  source: /note="Description of Artificial Sequence: Synthetic polypeptide"
QVQLVQSGAEVKKPGASVKVSCKASGYTFTGYYMHWVRQAPGQGLEWMGWINPNSGGTNYAQKFQGRVTMTRDTSISTAYMELSRLRSDDTAVYYCARDMNILATVPFDIWGQGTMVTVSSGGGGSGGGGSGGGGSDIQMTQSPSSLSASVGDRVTITCRASQSISTYLNWYQQKPGKAPNLLIYAAFSLQSGVPSRFSGSGSGTDFTLTINSLQPEDFATYYCQQGDSVPLTFGGGTKLEIK

SEQ ID NO: 479 - DNA, 729 bp, Artificial Sequence
  source: /note="Description of Artificial Sequence: Synthetic polynucleotide"
caagtgcaactcgtccaaagcggagcggaagtcaagaaacccggagcgagcgtgaaagtgtcctgcaaagcctccggctacacctttacgggctactacatgcactgggtgcgccaggcaccaggacagggtcttgaatggatgggatggatcaaccctaattcgggcggaactaactacgcacagaagttccaggggagagtgactctgactcgggatacctccatctcaactgtctacatggaactctcccgcttgcggtcagatgatacggcagtgtactactgcgcccgcgacatgaatatcctggctaccgtgccgttcgacatctggggacaggggactatggttactgtctcatcgggcggtggaggttcaggaggaggcggctcgggaggcggaggttcggacattcagatgacccagtccccatcctctctgtcggccagcgtcggagatagggtgaccattacctgtcgggcctcgcaaagcatctcctcgtacctcaactggtatcagcaaaagccgggaaaggcgcctaagctgctgatctacgccgcttcgagcttgcaaagcggggtgccatccagattctcgggatcaggctcaggaaccgacttcaccctgaccgtgaacagcctccagccggaggactttgccacttactactgccagcagggagactccgtgccgcttactttcggggggggtacccgcctggagatcaag

SEQ ID NO: 480 - protein, 243 aa, Artificial Sequence
  source: /note="Description of Artificial Sequence: Synthetic polypeptide"
QVQLVQSGAEVKKPGASVKVSCKASGYTFTGYYMHWVRQAPGQGLEWMGWINPNSGGTNYAQKFQGRVTLTRDTSISTVYMELSRLRSDDTAVYYCARDMNILATVPFDIWGQGTMVTVSSGGGGSGGGGSGGGGSDIQMTQSPSSLSASVGDRVTITCRASQSISSYLNWYQQKPGKAPKLLIYAASSLQSGVPSRFSGSGSGTDFTLTVNSLQPEDFATYYCQQGDSVPLTFGGGTRLEIK

SEQ ID NO: 481 - DNA, 1760 bp, Artificial Sequence
  source: /note="Description of Artificial Sequence: Synthetic polynucleotide"
atggccctccctgtcaccgccctgctgcttccgctggctcttctgctccacgccgctcggccccaagtgcaactcgtccaaagcggagcggaagtcaagaaacccggagcgagcgtgaaagtgtcctgcaaagcctccggctacacctttacgggctactacatgcactgggtgcgccaggcaccaggacagggtcttgaatggatgggatggatcaaccctaattcgggcggaactaactacgcacagaagttccaggggagagtgactctgactcgggatacctccatctcaactgtctacatggaactctcccgcttgcggtcagatgatacggcagtgtactactgcgcccgcgacatgaatatcctggctaccgtgccgttcgacatctggggacaggggactatggttactgtctcatcgggcggtggaggttcaggaggaggcggctcgggaggcggaggttcggacattcagatgacccagtccccatcctctctgtcggccagcgtcggagatagggtgaccattacctgtcgggcctcgcaaagcatctcctcgtacctcaactggtatcagcaaaagccgggaaaggcgcctaagctgctgatctacgccgcttcgagcttgcaaagcggggtgccatccagattctcgggatcaggctcaggaaccgacttcaccctgaccgtgaacagcctccagccggaggactttgccacttactactgccagcagggagactccgtgccgcttactttcggggggggtacccgcctggagatcaagaccactaccccagcaccgaggccacccaccccggctcctaccatcgcctcccagcctctgtccctgcgtccggaggcatgtagacccgcagctggtggggccgtgcatacccggggtcttgacttcgcctgcgatatctacatttgggcccctctggctggtacttgcggggtcctgctgctttcactcgtgatcactctttactgtaagcgcggtcggaagaagctgctgtacatctttaagcaacccttcatgaggcctgtgcagactactcaagaggaggacggctgttcttgccggttcccagaggaggaggaaggcggctgcgaactgcgcgtgaaattcagccgcagcgcagacgctccagcctacaagcaggggcagaaccagctctacaacgaactcaatcttggtcggagagaggagtacgacgtgctggacaagcggagaggacgggacccagaaatgggcgggaagccgcgcagaaagaatccccaagagggcctgtacaacgagctccaaaaggataagatggcagaagcctatagcgagattggtatgaaaggggaacgcagaagaggcaaaggccacgacggactgtaccagggactcagcaccgccaccaaggacacctatgacgctcttcacatgcaggccctgccgcctcggtaagtcgacagctcgctttcttgctgtccaatttctattaaaggttcctttgttccctaagtccaactactaaactgggggatattatgaagggccttgagcatctggattctgcctaataaaaaacatttattttcattgctgcgtcgagagctcgctttcttgctgtccaatttctattaaaggttcctttgttccctaagtccaactactaaactgggggatattatgaagggccttgagcatctggattctgcctaataaaaaacatttattttcattgctgcctcgacgaattc

SEQ ID NO: 482 - DNA, 729 bp, Artificial Sequence
  source: /note="Description of Artificial Sequence: Synthetic polynucleotide"
caagtccaactcgttcaatccggcgcagaagtcaagaagccaggagcatcagtgaaagtgtcctgcaaagcctcaggctacatcttcacgggatactacatccactgggtgcgccaggctccgggccagggccttgagtggatgggctggatcaaccctaactctgggggaaccaactacgctcagaagttccaggggagggtcactatgactcgcgatacctccatctccactgcgtacatggaactctcgggactgagatccgacgatcctgccgtgtactactgcgcccgggacatgaacatcttggcgaccgtgccgtttgacatttggggacagggcaccctcgtcactgtgtcgagcggtggaggaggctcggggggtggcggatcaggagggggaggaagcgacatccagctgactcagagcccatcgtcgttgtccgcgtcggtgggggatagagtgaccattacttgccgcgccagccagagcatctcatcatatctgaattggtaccagcagaagcccggaaaggccccaaaactgctgatctacgctgcaagcagcctccaatcgggagtgccgtcacggttctccgggtccggttcgggaactgactttaccctgaccgtgaattcgctgcaaccggaggatttcgccacgtactactgtcagcaaggagactccgtgccgctgaccttcggtggaggcaccaaggtcgaaatcaag

SEQ ID NO: 483 - protein, 243 aa, Artificial Sequence
  source: /note="Description of Artificial Sequence: Synthetic polypeptide"
QVQLVQSGAEVKKPGASVKVSCKASGYIFTGYYIHWVRQAPGQGLEWMGWINPNSGGTNYAQKFQGRVTMTRDTSISTAYMELSGLRSDDPAVYYCARDMNILATVPFDIWGQGTLVTVSSGGGGSGGGGSGGGGSDIQLTQSPSSLSASVGDRVTITCRASQSISSYLNWYQQKPGKAPKLLIYAASSLQSGVPSRFSGSGSGTDFTLTVNSLQPEDFATYYCQQGDSVPLTFGGGTKVEIK

SEQ ID NO: 484 - DNA, 735 bp, Artificial Sequence
  source: /note="Description of Artificial Sequence: Synthetic polynucleotide"
caagtccaactccaacagtcaggcgcagaagtgaaaaagagcggtgcatcggtgaaagtgtcatgcaaagcctcgggctacaccttcactgactactatatgcactggctgcggcaggcaccgggacagggacttgagtggatgggatggatcaacccgaattcaggggacactaactacgcgcagaagttccaggggagagtgaccctgacgagggacacctcaatttcgaccgtctacatggaattgtcgcgcctgagatcggacgatactgctgtgtactactgtgcccgcgacatgaacatcctcgcgactgtgccttttgatatctggggacaggggactatggtcaccgtttcctccgcttccggtggcggaggctcgggaggccgggcctccggtggaggaggcagcgacatccagatgactcagagcccttcctcgctgagcgcctcagtgggagatcgcgtgaccatcacttgccgggccagccagtccatttcgtcctacctcaattggtaccagcagaagccgggaaaggcgcccaagctcttgatctacgctgcgagctccctgcaaagcggggtgccgagccgattctcgggttccggctcgggaaccgacttcactctgaccatctcatccctgcaaccagaggactttgccacctactactgccaacaaggagattctgtcccactgacgttcggcggaggaaccaaggtcgaaatcaag

SEQ ID NO: 485 - protein, 245 aa, Artificial Sequence
  source: /note="Description of Artificial Sequence: Synthetic polypeptide"
QVQLQQSGAEVKKSGASVKVSCKASGYTFTDYYMHWLRQAPGQGLEWMGWINPNSGDTNYAQKFQGRVTLTRDTSISTVYMELSRLRSDDTAVYYCARDMNILATVPFDIWGQGTMVTVSSASGGGGSGGRASGGGGSDIQMTQSPSSLSASVGDRVTITCRASQSISSYLNWYQQKPGKAPKLLIYAASSLQSGVPSRFSGSGSGTDFTLTISSLQPEDFATYYCQQGDSVPLTFGGGTKVEIK

SEQ ID NO: 486 - protein, 5 aa, Artificial Sequence
  source: /note="Description of Artificial Sequence: Synthetic peptide"
GYYMH

SEQ ID NO: 487 - protein, 5 aa, Artificial Sequence
  source: /note="Description of Artificial Sequence: Synthetic peptide"
GYYMH

SEQ ID NO: 488 - protein, 5 aa, Artificial Sequence
  source: /note="Description of Artificial Sequence: Synthetic peptide"
GYYIH

SEQ ID NO: 489 - protein, 5 aa, Artificial Sequence
  source: /note="Description of Artificial Sequence: Synthetic peptide"
DYYMH

SEQ ID NO: 490 - protein, 5 aa, Artificial Sequence
  source: /note="Description of Artificial Sequence: Synthetic peptide"
SYWMN

SEQ ID NO: 491 - protein, 17 aa, Artificial Sequence
  source: /note="Description of Artificial Sequence: Synthetic peptide"
WINPNSGGTNYAQKFQG

SEQ ID NO: 492 - protein, 17 aa, Artificial Sequence
  source: /note="Description of Artificial Sequence: Synthetic peptide"
WINPNSGGTNYAQKFQG

SEQ ID NO: 493 - protein, 17 aa, Artificial Sequence
  source: /note="Description of Artificial Sequence: Synthetic peptide"
WINPNSGGTNYAQKFQG

SEQ ID NO: 494 - protein, 17 aa, Artificial Sequence
  source: /note="Description of Artificial Sequence: Synthetic peptide"
WINPNSGDTNYAQKFQG

SEQ ID NO: 495 - protein, 17 aa, Artificial Sequence
  source: /note="Description of Artificial Sequence: Synthetic peptide"
RIDPYDSETHYNQKFKD

SEQ ID NO: 496 - protein, 12 aa, Artificial Sequence
  source: /note="Description of Artificial Sequence: Synthetic peptide"
DMNILATVPFDI

SEQ ID NO: 497 - protein, 12 aa, Artificial Sequence
  source: /note="Description of Artificial Sequence: Synthetic peptide"
DMNILATVPFDI

SEQ ID NO: 498 - protein, 12 aa, Artificial Sequence
  source: /note="Description of Artificial Sequence: Synthetic peptide"
DMNILATVPFDI

SEQ ID NO: 499 - protein, 12 aa, Artificial Sequence
  source: /note="Description of Artificial Sequence: Synthetic peptide"
DMNILATVPFDI

SEQ ID NO: 500 - protein, 6 aa, Artificial Sequence
  source: /note="Description of Artificial Sequence: Synthetic peptide"
GNWDDY

SEQ ID NO: 501 - protein, 11 aa, Artificial Sequence
  source: /note="Description of Artificial Sequence: Synthetic peptide"
RASQSISTYLN

SEQ ID NO: 502 - protein, 11 aa, Artificial Sequence
  source: /note="Description of Artificial Sequence: Synthetic peptide"
RASQSISSYLN

SEQ ID NO: 503 - protein, 11 aa, Artificial Sequence
  source: /note="Description of Artificial Sequence: Synthetic peptide"
RASQSISSYLN

SEQ ID NO: 504 - protein, 11 aa, Artificial Sequence
  source: /note="Description of Artificial Sequence: Synthetic peptide"
RASQSISSYLN

SEQ ID NO: 505 - protein, 11 aa, Artificial Sequence
  source: /note="Description of Artificial Sequence: Synthetic peptide"
RASKSISKDLA

SEQ ID NO: 506 - protein, 7 aa, Artificial Sequence
  source: /note="Description of Artificial Sequence: Synthetic peptide"
AAFSLQS

SEQ ID NO: 507 - protein, 7 aa, Artificial Sequence
  source: /note="Description of Artificial Sequence: Synthetic peptide"
AASSLQS

SEQ ID NO: 508 - protein, 7 aa, Artificial Sequence
  source: /note="Description of Artificial Sequence: Synthetic peptide"
AASSLQS

SEQ ID NO: 509 - protein, 7 aa, Artificial Sequence
  source: /note="Description of Artificial Sequence: Synthetic peptide"
AASSLQS

SEQ ID NO: 510 - protein, 7 aa, Artificial Sequence
  source: /note="Description of Artificial Sequence: Synthetic peptide"
SGSTLQS

SEQ ID NO: 511 - protein, 9 aa, Artificial Sequence
  source: /note="Description of Artificial Sequence: Synthetic peptide"
QQGDSVPLT

SEQ ID NO: 512 - protein, 9 aa, Artificial Sequence
  source: /note="Description of Artificial Sequence: Synthetic peptide"
QQGDSVPLT

SEQ ID NO: 513 - protein, 9 aa, Artificial Sequence
  source: /note="Description of Artificial Sequence: Synthetic peptide"
QQGDSVPLT

SEQ ID NO: 514 - protein, 9 aa, Artificial Sequence
  source: /note="Description of Artificial Sequence: Synthetic peptide"
QQGDSVPLT

SEQ ID NO: 515 - protein, 9 aa, Artificial Sequence
  source: /note="Description of Artificial Sequence: Synthetic peptide"
QQHNKYPYT

SEQ ID NO: 516 - protein, 7 aa, Artificial Sequence
  source: /note="Description of Artificial Sequence: Synthetic peptide"
GYTFTGY

SEQ ID NO: 517 - protein, 7 aa, Artificial Sequence
  source: /note="Description of Artificial Sequence: Synthetic peptide"
GYTFTGY

SEQ ID NO: 518 - protein, 7 aa, Artificial Sequence
  source: /note="Description of Artificial Sequence: Synthetic peptide"
GYIFTGY

SEQ ID NO: 519 - protein, 7 aa, Artificial Sequence
  source: /note="Description of Artificial Sequence: Synthetic peptide"
GYTFTDY

SEQ ID NO: 520 - protein, 7 aa, Artificial Sequence
  source: /note="Description of Artificial Sequence: Synthetic peptide"
GYTFTSY

SEQ ID NO: 521 - protein, 6 aa, Artificial Sequence
  source: /note="Description of Artificial Sequence: Synthetic peptide"
NPNSGG

SEQ ID NO: 522 - protein, 6 aa, Artificial Sequence
  source: /note="Description of Artificial Sequence: Synthetic peptide"
NPNSGG

SEQ ID NO: 523 - protein, 6 aa, Artificial Sequence
  source: /note="Description of Artificial Sequence: Synthetic peptide"
NPNSGG

SEQ ID NO: 524 - protein, 6 aa, Artificial Sequence
  source: /note="Description of Artificial Sequence: Synthetic peptide"
NPNSGD

SEQ ID NO: 525 - protein, 6 aa, Artificial Sequence
  source: /note="Description of Artificial Sequence: Synthetic peptide"
DPYDSE

SEQ ID NO: 526 - protein, 12 aa, Artificial Sequence
  source: /note="Description of Artificial Sequence: Synthetic peptide"
DMNILATVPFDI

SEQ ID NO: 527 - protein, 12 aa, Artificial Sequence
  source: /note="Description of Artificial Sequence: Synthetic peptide"
DMNILATVPFDI

SEQ ID NO: 528 - protein, 12 aa, Artificial Sequence
  source: /note="Description of Artificial Sequence: Synthetic peptide"
DMNILATVPFDI

SEQ ID NO: 529 - protein, 12 aa, Artificial Sequence
  source: /note="Description of Artificial Sequence: Synthetic peptide"
DMNILATVPFDI

SEQ ID NO: 530 - protein, 6 aa, Artificial Sequence
  source: /note="Description of Artificial Sequence: Synthetic peptide"
GNWDDY

SEQ ID NO: 531 - protein, 7 aa, Artificial Sequence
  source: /note="Description of Artificial Sequence: Synthetic peptide"
SQSISTY

SEQ ID NO: 532 - protein, 7 aa, Artificial Sequence
  source: /note="Description of Artificial Sequence: Synthetic peptide"
SQSISSY

SEQ ID NO: 533 - protein, 7 aa, Artificial Sequence
  source: /note="Description of Artificial Sequence: Synthetic peptide"
SQSISSY

SEQ ID NO: 534 - protein, 7 aa, Artificial Sequence
  source: /note="Description of Artificial Sequence: Synthetic peptide"
SQSISSY

SEQ ID NO: 535 - protein, 7 aa, Artificial Sequence
  source: /note="Description of Artificial Sequence: Synthetic peptide"
SKSISKD

SEQ ID NO: 536 - protein, 3 aa, Artificial Sequence
  source: /note="Description of Artificial Sequence: Synthetic peptide"
AAF

SEQ ID NO: 537 - protein, 3 aa, Artificial Sequence
  source: /note="Description of Artificial Sequence: Synthetic peptide"
AAS

SEQ ID NO: 538 - protein, 3 aa, Artificial Sequence
  source: /note="Description of Artificial Sequence: Synthetic peptide"
AAS

SEQ ID NO: 539 - protein, 3 aa, Artificial Sequence
  source: /note="Description of Artificial Sequence: Synthetic peptide"
AAS

SEQ ID NO: 540 - protein, 3 aa, Artificial Sequence
  source: /note="Description of Artificial Sequence: Synthetic peptide"
SGS

SEQ ID NO: 541 - protein, 6 aa, Artificial Sequence
  source: /note="Description of Artificial Sequence: Synthetic peptide"
GDSVPL

SEQ ID NO: 542 - protein, 6 aa, Artificial Sequence
  source: /note="Description of Artificial Sequence: Synthetic peptide"
GDSVPL

SEQ ID NO: 543 - protein, 6 aa, Artificial Sequence
  source: /note="Description of Artificial Sequence: Synthetic peptide"
GDSVPL

SEQ ID NO: 544 - protein, 6 aa, Artificial Sequence
  source: /note="Description of Artificial Sequence: Synthetic peptide"
GDSVPL

SEQ ID NO: 545-554 - skipped (10 entries)

SEQ ID NO: 555 - protein, 6 aa, Artificial Sequence
  source: /note="Description of Artificial Sequence: Synthetic peptide"
HNKYPY

SEQ ID NO: 556 - protein, 242 aa, Artificial Sequence
  source: /note="Description of Artificial Sequence: Synthetic polypeptide"
QVQLVQSGAEVKKPGASVKVSCKASGYTFTSYWMNWVRQAPGQGLEWMGRIDPYDSETHYNQKFKDRVTMTVDKSTSTAYMELSSLRSEDTAVYYCARGNWDDYWGQGTTVTVSSGGGGSGGGGSGGGGSGGGGSDVQLTQSPSFLSASVGDRVTITCRASKSISKDLAWYQQKPGKAPKLLIYSGSTLQSGVPSRFSGSGSGTEFTLTISSLQPEDFATYYCQQHNKYPYTFGGGTKVEIK

SEQ ID NO: 557 - protein, 242 aa, Artificial Sequence
  source: /note="Description of Artificial Sequence: Synthetic polypeptide"
QVQLVQSGAEVKKPGASVKVSCKASGYTFTSYWMNWVRQAPGQGLEWMGRIDPYDSETHYNQKFKDRVTMTVDKSTSTAYMELSSLRSEDTAVYYCARGNWDDYWGQGTTVTVSSGGGGSGGGGSGGGGSGGGGSEVVLTQSPATLSLSPGERATLSCRASKSISKDLAWYQQKPGQAPRLLIYSGSTLQSGIPARFSGSGSGTDFTLTISSLEPEDFAVYYCQQHNKYPYTFGGGTKVEIK

SEQ ID NO: 558 - protein, 242 aa, Artificial Sequence
  source: /note="Description of Artificial Sequence: Synthetic polypeptide"
QVQLVQSGAEVKKPGASVKVSCKASGYTFTSYWMNWVRQAPGQGLEWMGRIDPYDSETHYNQKFKDRVTMTVDKSTSTAYMELSSLRSEDTAVYYCARGNWDDYWGQGTTVTVSSGGGGSGGGGSGGGGSGGGGSDVVMTQSPAFLSVTPGEKVTITCRASKSISKDLAWYQQKPDQAPKLLIYSGSTLQSGVPSRFSGSGSGTDFTFTISSLEAEDAATYYCQQHNKYPYTFGGGTKVEIK

SEQ ID NO: 559 - protein, 242 aa, Artificial Sequence
  source: /note="Description of Artificial Sequence: Synthetic polypeptide"
QVQLVQSGAEVKKPGASVKVSCKASGYTFTSYWMNWVRQAPGQGLEWMGRIDPYDSETHYNQKFKDRVTMTVDKSTSTAYMELSSLRSEDTAVYYCARGNWDDYWGQGTTVTVSSGGGGSGGGGSGGGGSGGGGSDVVMTQSPDSLAVSLGERATINCRASKSISKDLAWYQQKPGQPPKLLIYSGSTLQSGVPDRFSGSGSGTDFTLTISSLQAEDVAVYYCQQHNKYPYTFGGGTKVEIK

SEQ ID NO: 560 - protein, 242 aa, Artificial Sequence
  source: /note="Description of Artificial Sequence: Synthetic polypeptide"
DVQLTQSPSFLSASVGDRVTITCRASKSISKDLAWYQQKPGKAPKLLIYSGSTLQSGVPSRFSGSGSGTEFTLTISSLQPEDFATYYCQQHNKYPYTFGGGTKVEIKGGGGSGGGGSGGGGSGGGGSQVQLVQSGAEVKKPGASVKVSCKASGYTFTSYWMNWVRQAPGQGLEWMGRIDPYDSETHYNQKFKDRVTMTVDKSTSTAYMELSSLRSEDTAVYYCARGNWDDYWGQGTTVTVSS

SEQ ID NO: 561 - protein, 242 aa, Artificial Sequence
  source: /note="Description of Artificial Sequence: Synthetic polypeptide"
EVVLTQSPATLSLSPGERATLSCRASKSISKDLAWYQQKPGQAPRLLIYSGSTLQSGIPARFSGSGSGTDFTLTISSLEPEDFAVYYCQQHNKYPYTFGGGTKVEIKGGGGSGGGGSGGGGSGGGGSQVQLVQSGAEVKKPGASVKVSCKASGYTFTSYWMNWVRQAPGQGLEWMGRIDPYDSETHYNQKFKDRVTMTVDKSTSTAYMELSSLRSEDTAVYYCARGNWDDYWGQGTTVTVSS

SEQ ID NO: 562 - protein, 242 aa, Artificial Sequence
  source: /note="Description of Artificial Sequence: Synthetic polypeptide"
DVVMTQSPAFLSVTPGEKVTITCRASKSISKDLAWYQQKPDQAPKLLIYSGSTLQSGVPSRFSGSGSGTDFTFTISSLEAEDAATYYCQQHNKYPYTFGGGTKVEIKGGGGSGGGGSGGGGSGGGGSQVQLVQSGAEVKKPGASVKVSCKASGYTFTSYWMNWVRQAPGQGLEWMGRIDPYDSETHYNQKFKDRVTMTVDKSTSTAYMELSSLRSEDTAVYYCARGNWDDYWGQGTTVTVSS

SEQ ID NO: 563 - protein, 242 aa, Artificial Sequence
  source: /note="Description of Artificial Sequence: Synthetic polypeptide"
DVVMTQSPDSLAVSLGERATINCRASKSISKDLAWYQQKPGQPPKLLIYSGSTLQSGVPDRFSGSGSGTDFTLTISSLQAEDVAVYYCQQHNKYPYTFGGGTKVEIKGGGGSGGGGSGGGGSGGGGSQVQLVQSGAEVKKPGASVKVSCKASGYTFTSYWMNWVRQAPGQGLEWMGRIDPYDSETHYNQKFKDRVTMTVDKSTSTAYMELSSLRSEDTAVYYCARGNWDDYWGQGTTVTVSS

SEQ ID NO: 564 - protein, 242 aa, Artificial Sequence
  source: /note="Description of Artificial Sequence: Synthetic polypeptide"
QVQLVQSGSELKKPGASVKVSCKASGYTFTSYWMNWVRQAPGQGLEWMGRIDPYDSETHYNQKFKDRFVFSVDKSVSTAYLQISSLKAEDTAVYYCARGNWDDYWGQGTTVTVSSGGGGSGGGGSGGGGSGGGGSDVQLTQSPSFLSASVGDRVTITCRASKSISKDLAWYQQKPGKAPKLLIYSGSTLQSGVPSRFSGSGSGTEFTLTISSLQPEDFATYYCQQHNKYPYTFGGGTKVEIK

SEQ ID NO: 565 - protein, 242 aa, Artificial Sequence
  source: /note="Description of Artificial Sequence: Synthetic polypeptide"
QVQLVQSGSELKKPGASVKVSCKASGYTFTSYWMNWVRQAPGQGLEWMGRIDPYDSETHYNQKFKDRFVFSVDKSVSTAYLQISSLKAEDTAVYYCARGNWDDYWGQGTTVTVSSGGGGSGGGGSGGGGSGGGGSEVVLTQSPATLSLSPGERATLSCRASKSISKDLAWYQQKPGQAPRLLIYSGSTLQSGIPARFSGSGSGTDFTLTISSLEPEDFAVYYCQQHNKYPYTFGGGTKVEIK

SEQ ID NO: 566 - protein, 242 aa, Artificial Sequence
  source: /note="Description of Artificial Sequence: Synthetic polypeptide"
QVQLVQSGSELKKPGASVKVSCKASGYTFTSYWMNWVRQAPGQGLEWMGRIDPYDSETHYNQKFKDRFVFSVDKSVSTAYLQISSLKAEDTAVYYCARGNWDDYWGQGTTVTVSSGGGGSGGGGSGGGGSGGGGSDVVMTQSPAFLSVTPGEKVTITCRASKSISKDLAWYQQKPDQAPKLLIYSGSTLQSGVPSRFSGSGSGTDFTFTISSLEAEDAATYYCQQHNKYPYTFGGGTKVEIK

SEQ ID NO: 567 - protein, 242 aa, Artificial Sequence
  source: /note="Description of Artificial Sequence: Synthetic polypeptide"
QVQLVQSGSELKKPGASVKVSCKASGYTFTSYWMNWVRQAPGQGLEWMGRIDPYDSETHYNQKFKDRFVFSVDKSVSTAYLQISSLKAEDTAVYYCARGNWDDYWGQGTTVTVSSGGGGSGGGGSGGGGSGGGGSDVVMTQSPDSLAVSLGERATINCRASKSISKDLAWYQQKPGQPPKLLIYSGSTLQSGVPDRFSGSGSGTDFTLTISSLQAEDVAVYYCQQHNKYPYTFGGGTKVEIK

SEQ ID NO: 568 - protein, 242 aa, Artificial Sequence
  source: /note="Description of Artificial Sequence: Synthetic polypeptide"
DVQLTQSPSFLSASVGDRVTITCRASKSISKDLAWYQQKPGKAPKLLIYSGSTLQSGVPSRFSGSGSGTEFTLTISSLQPEDFATYYCQQHNKYPYTFGGGTKVEIKGGGGSGGGGSGGGGSGGGGSQVQLVQSGSELKKPGASVKVSCKASGYTFTSYWMNWVRQAPGQGLEWMGRIDPYDSETHYNQKFKDRFVFSVDKSVSTAYLQISSLKAEDTAVYYCARGNWDDYWGQGTTVTVSS

SEQ ID NO: 569 - protein, 242 aa, Artificial Sequence
  source: /note="Description of Artificial Sequence: Synthetic polypeptide"
EVVLTQSPATLSLSPGERATLSCRASKSISKDLAWYQQKPGQAPRLLIYSGSTLQSGIPARFSGSGSGTDFTLTISSLEPEDFAVYYCQQHNKYPYTFGGGTKVEIKGGGGSGGGGSGGGGSGGGGSQVQLVQSGSELKKPGASVKVSCKASGYTFTSYWMNWVRQAPGQGLEWMGRIDPYDSETHYNQKFKDRFVFSVDKSVSTAYLQISSLKAEDTAVYYCARGNWDDYWGQGTTVTVSS

SEQ ID NO: 570 - protein, 242 aa, Artificial Sequence
  source: /note="Description of Artificial Sequence: Synthetic polypeptide"
DVVMTQSPAFLSVTPGEKVTITCRASKSISKDLAWYQQKPDQAPKLLIYSGSTLQSGVPSRFSGSGSGTDFTFTISSLEAEDAATYYCQQHNKYPYTFGGGTKVEIKGGGGSGGGGSGGGGSGGGGSQVQLVQSGSELKKPGASVKVSCKASGYTFTSYWMNWVRQAPGQGLEWMGRIDPYDSETHYNQKFKDRFVFSVDKSVSTAYLQISSLKAEDTAVYYCARGNWDDYWGQGTTVTVSS

SEQ ID NO: 571 - protein, 242 aa, Artificial Sequence
  source: /note="Description of Artificial Sequence: Synthetic polypeptide"
DVVMTQSPDSLAVSLGERATINCRASKSISKDLAWYQQKPGQPPKLLIYSGSTLQSGVPDRFSGSGSGTDFTLTISSLQAEDVAVYYCQQHNKYPYTFGGGTKVEIKGGGGSGGGGSGGGGSGGGGSQVQLVQSGSELKKPGASVKVSCKASGYTFTSYWMNWVRQAPGQGLEWMGRIDPYDSETHYNQKFKDRFVFSVDKSVSTAYLQISSLKAEDTAVYYCARGNWDDYWGQGTTVTVSS

SEQ ID NO: 572 - protein, 242 aa, Artificial Sequence
  source: /note="Description of Artificial Sequence: Synthetic polypeptide"
EVQLVQSGAEVKKPGESLRISCKGSGYTFTSYWMNWVRQMPGKGLEWMGRIDPYDSETHYNQKFKDHVTISVDKSISTAYLQWSSLKASDTAMYYCARGNWDDYWGQGTTVTVSSGGGGSGGGGSGGGGSGGGGSDVQLTQSPSFLSASVGDRVTITCRASKSISKDLAWYQQKPGKAPKLLIYSGSTLQSGVPSRFSGSGSGTEFTLTISSLQPEDFATYYCQQHNKYPYTFGGGTKVEIK

SEQ ID NO: 573 - protein, 242 aa, Artificial Sequence
  source: /note="Description of Artificial Sequence: Synthetic polypeptide"
EVQLVQSGAEVKKPGESLRISCKGSGYTFTSYWMNWVRQMPGKGLEWMGRIDPYDSETHYNQKFKDHVTISVDKSISTAYLQWSSLKASDTAMYYCARGNWDDYWGQGTTVTVSSGGGGSGGGGSGGGGSGGGGSEVVLTQSPATLSLSPGERATLSCRASKSISKDLAWYQQKPGQAPRLLIYSGSTLQSGIPARFSGSGSGTDFTLTISSLEPEDFAVYYCQQHNKYPYTFGGGTKVEIK

SEQ ID NO: 574 - protein, 242 aa, Artificial Sequence
  source: /note="Description of Artificial Sequence: Synthetic polypeptide"
EVQLVQSGAEVKKPGESLRISCKGSGYTFTSYWMNWVRQMPGKGLEWMGRIDPYDSETHYNQKFKDHVTISVDKSISTAYLQWSSLKASDTAMYYCARGNWDDYWGQGTTVTVSSGGGGSGGGGSGGGGSGGGGSDVVMTQSPAFLSVTPGEKVTITCRASKSISKDLAWYQQKPDQAPKLLIYSGSTLQSGVPSRFSGSGSGTDFTFTISSLEAEDAATYYCQQHNKYPYTFGGGTKVEIK

SEQ ID NO: 575 - protein, 242 aa, Artificial Sequence
  source: /note="Description of Artificial Sequence: Synthetic polypeptide"
EVQLVQSGAEVKKPGESLRISCKGSGYTFTSYWMNWVRQMPGKGLEWMGRIDPYDSETHYNQKFKDHVTISVDKSISTAYLQWSSLKASDTAMYYCARGNWDDYWGQGTTVTVSSGGGGSGGGGSGGGGSGGGGSDVVMTQSPDSLAVSLGERATINCRASKSISKDLAWYQQKPGQPPKLLIYSGSTLQSGVPDRFSGSGSGTDFTLTISSLQAEDVAVYYCQQHNKYPYTFGGGTKVEIK

SEQ ID NO: 576 - protein, 242 aa, Artificial Sequence
  source: /note="Description of Artificial Sequence: Synthetic polypeptide"
DVQLTQSPSFLSASVGDRVTITCRASKSISKDLAWYQQKPGKAPKLLIYSGSTLQSGVPSRFSGSGSGTEFTLTISSLQPEDFATYYCQQHNKYPYTFGGGTKVEIKGGGGSGGGGSGGGGSGGGGSEVQLVQSGAEVKKPGESLRISCKGSGYTFTSYWMNWVRQMPGKGLEWMGRIDPYDSETHYNQKFKDHVTISVDKSISTAYLQWSSLKASDTAMYYCARGNWDDYWGQGTTVTVSS

SEQ ID NO: 577 - protein, 242 aa, Artificial Sequence
  source: /note="Description of Artificial Sequence: Synthetic polypeptide"
EVVLTQSPATLSLSPGERATLSCRASKSISKDLAWYQQKPGQAPRLLIYSGSTLQSGIPARFSGSGSGTDFTLTISSLEPEDFAVYYCQQHNKYPYTFGGGTKVEIKGGGGSGGGGSGGGGSGGGGSEVQLVQSGAEVKKPGESLRISCKGSGYTFTSYWMNWVRQMPGKGLEWMGRIDPYDSETHYNQKFKDHVTISVDKSISTAYLQWSSLKASDTAMYYCARGNWDDYWGQGTTVTVSS

SEQ ID NO: 578 - protein, 242 aa, Artificial Sequence
  source: /note="Description of Artificial Sequence: Synthetic polypeptide"
DVVMTQSPAFLSVTPGEKVTITCRASKSISKDLAWYQQKPDQAPKLLIYSGSTLQSGVPSRFSGSGSGTDFTFTISSLEAEDAATYYCQQHNKYPYTFGGGTKVEIKGGGGSGGGGSGGGGSGGGGSEVQLVQSGAEVKKPGESLRISCKGSGYTFTSYWMNWVRQMPGKGLEWMGRIDPYDSETHYNQKFKDHVTISVDKSISTAYLQWSSLKASDTAMYYCARGNWDDYWGQGTTVTVSS

SEQ ID NO: 579 - protein, 242 aa, Artificial Sequence
  source: /note="Description of Artificial Sequence: Synthetic polypeptide"
DVVMTQSPDSLAVSLGERATINCRASKSISKDLAWYQQKPGQPPKLLIYSGSTLQSGVPDRFSGSGSGTDFTLTISSLQAEDVAVYYCQQHNKYPYTFGGGTKVEIKGGGGSGGGGSGGGGSGGGGSEVQLVQSGAEVKKPGESLRISCKGSGYTFTSYWMNWVRQMPGKGLEWMGRIDPYDSETHYNQKFKDHVTISVDKSISTAYLQWSSLKASDTAMYYCARGNWDDYWGQGTTVTVSS

SEQ ID NO: 580 - protein, 242 aa, Artificial Sequence
  source: /note="Description of Artificial Sequence: Synthetic polypeptide"
EVQLVESGGGLVQPGGSLRLSCAASGYTFTSYWMNWVRQAPGKGLVWVSRIDPYDSETHYNQKFKDRFTISVDKAKSTAYLQMNSLRAEDTAVYYCARGNWDDYWGQGTTVTVSSGGGGSGGGGSGGGGSGGGGSDVQLTQSPSFLSASVGDRVTITCRASKSISKDLAWYQQKPGKAPKLLIYSGSTLQSGVPSRFSGSGSGTEFTLTISSLQPEDFATYYCQQHNKYPYTFGGGTKVEIK

SEQ ID NO: 581 - protein, 242 aa, Artificial Sequence
  source: /note="Description of Artificial Sequence: Synthetic polypeptide"
EVQLVESGGGLVQPGGSLRLSCAASGYTFTSYWMNWVRQAPGKGLVWVSRIDPYDSETHYNQKFKDRFTISVDKAKSTAYLQMNSLRAEDTAVYYCARGNWDDYWGQGTTVTVSSGGGGSGGGGSGGGGSGGGGSEVVLTQSPATLSLSPGERATLSCRASKSISKDLAWYQQKPGQAPRLLIYSGSTLQSGIPARFSGSGSGTDFTLTISSLEPEDFAVYYCQQHNKYPYTFGGGTKVEIK

SEQ ID NO: 582 - protein, 242 aa, Artificial Sequence
  source: /note="Description of Artificial Sequence: Synthetic polypeptide"
EVQLVESGGGLVQPGGSLRLSCAASGYTFTSYWMNWVRQAPGKGLVWVSRIDPYDSETHYNQKFKDRFTISVDKAKSTAYLQMNSLRAEDTAVYYCARGNWDDYWGQGTTVTVSSGGGGSGGGGSGGGGSGGGGSDVVMTQSPAFLSVTPGEKVTITCRASKSISKDLAWYQQKPDQAPKLLIYSGSTLQSGVPSRFSGSGSGTDFTFTISSLEAEDAATYYCQQHNKYPYTFGGGTKVEIK

SEQ ID NO: 583 - protein, 242 aa, Artificial Sequence
  source: /note="Description of Artificial Sequence: Synthetic polypeptide"
EVQLVESGGGLVQPGGSLRLSCAASGYTFTSYWMNWVRQAPGKGLVWVSRIDPYDSETHYNQKFKDRFTISVDKAKSTAYLQMNSLRAEDTAVYYCARGNWDDYWGQGTTVTVSSGGGGSGGGGSGGGGSGGGGSDVVMTQSPDSLAVSLGERATINCRASKSISKDLAWYQQKPGQPPKLLIYSGSTLQSGVPDRFSGSGSGTDFTLTISSLQAEDVAVYYCQQHNKYPYTFGGGTKVEIK

SEQ ID NO: 584 - protein, 242 aa, Artificial Sequence
  source: /note="Description of Artificial Sequence: Synthetic polypeptide"
DVQLTQSPSFLSASVGDRVTITCRASKSISKDLAWYQQKPGKAPKLLIYSGSTLQSGVPSRFSGSGSGTEFTLTISSLQPEDFATYYCQQHNKYPYTFGGGTKVEIKGGGGSGGGGSGGGGSGGGGSEVQLVESGGGLVQPGGSLRLSCAASGYTFTSYWMNWVRQAPGKGLVWVSRIDPYDSETHYNQKFKDRFTISVDKAKSTAYLQMNSLRAEDTAVYYCARGNWDDYWGQGTTVTVSS

SEQ ID NO: 585 - protein, 242 aa, Artificial Sequence
  source: /note="Description of Artificial Sequence: Synthetic polypeptide"
EVVLTQSPATLSLSPGERATLSCRASKSISKDLAWYQQKPGQAPRLLIYSGSTLQSGIPARFSGSGSGTDFTLTISSLEPEDFAVYYCQQHNKYPYTFGGGTKVEIKGGGGSGGGGSGGGGSGGGGSEVQLVESGGGLVQPGGSLRLSCAASGYTFTSYWMNWVRQAPGKGLVWVSRIDPYDSETHYNQKFKDRFTISVDKAKSTAYLQMNSLRAEDTAVYYCARGNWDDYWGQGTTVTVSS

SEQ ID NO: 586 - protein, 242 aa, Artificial Sequence
  source: /note="Description of Artificial Sequence: Synthetic polypeptide"
DVVMTQSPAFLSVTPGEKVTITCRASKSISKDLAWYQQKPDQAPKLLIYSGSTLQSGVPSRFSGSGSGTDFTFTISSLEAEDAATYYCQQHNKYPYTFGGGTKVEIKGGGGSGGGGSGGGGSGGGGSEVQLVESGGGLVQPGGSLRLSCAASGYTFTSYWMNWVRQAPGKGLVWVSRIDPYDSETHYNQKFKDRFTISVDKAKSTAYLQMNSLRAEDTAVYYCARGNWDDYWGQGTTVTVSS

SEQ ID NO: 587 - protein, 242 aa, Artificial Sequence
  source: /note="Description of Artificial Sequence: Synthetic polypeptide"
DVVMTQSPDSLAVSLGERATINCRASKSISKDLAWYQQKPGQPPKLLIYSGSTLQSGVPDRFSGSGSGTDFTLTISSLQAEDVAVYYCQQHNKYPYTFGGGTKVEIKGGGGSGGGGSGGGGSGGGGSEVQLVESGGGLVQPGGSLRLSCAASGYTFTSYWMNWVRQAPGKGLVWVSRIDPYDSETHYNQKFKDRFTISVDKAKSTAYLQMNSLRAEDTAVYYCARGNWDDYWGQGTTVTVSS

SEQ ID NO: 588 - protein, 132 aa, Artificial Sequence
  source: /note="Description of Artificial Sequence: Synthetic polypeptide"
DVPDYASLGGPSSPKKKRKVSRGVQVETISPGDGRTFPKRGQTCVVHYTGMLEDGKKFDSSRDRNKPFKFMLGKQEVIRGWEEGVAQMSVGQRAKLTISPDYAYGATGHPGIIPPHATLVFDVELLKLETSY

SEQ ID NO: 589 - protein, 108 aa, Artificial Sequence
  source: /note="Description of Artificial Sequence: Synthetic polypeptide"
VQVETISPGDGRTFPKRGQTCVVHYTGMLEDGKKFDSSRDRNKPFKFMLGKQEVIRGWEEGVAQMSVGQRAKLTISPDYAYGATGHPGIIPPHATLVFDVELLKLETS

SEQ ID NO: 590 - protein, 93 aa, Artificial Sequence [sequence omitted]

SEQ ID NO: 591 - protein, 95 aa, Artificial Sequence
  source: /note="Description of Artificial Sequence: Synthetic polypeptide"
ILWHEMWHEGLIEASRLYFGERNVKGMFEVLEPLHAMMERGPQTLKETSFNQAYGRDLMEAQEWCRKYMKSGNVKDLTQAWDLYYHVFRRISKTS

SEQ ID NO: 592 - protein, 95 aa, Artificial Sequence
  source: /note="Description of Artificial Sequence: Synthetic polypeptide"
ILWHEMWHEGLLEASRLYFGERNVKGMFEVLEPLHAMMERGPQTLKETSFNQAYGRDLMEAQEWCRKYMKSGNVKDLTQAWDLYYHVFRRISKTS

SEQ ID NO: 593 - protein, 95 aa, Artificial Sequence
  source: /note="Description of Artificial Sequence: Synthetic polypeptide"
ILWHEMWHEGLEEASRLYFGERNVKGMFEVLEPLHAMMERGPQTLKETSFNQAYGRDLMEAQEWCRKYMKSGNVKDLLQAWDLYYHVFRRISKTS

SEQ ID NO: 594 - protein, 95 aa, Artificial Sequence
  source: /note="Description of Artificial Sequence: Synthetic polypeptide"
  MOD_RES (12)..(12): Any amino acid
  MOD_RES (78)..(78): Any amino acid
ILWHEMWHEGLXEASRLYFGERNVKGMFEVLEPLHAMMERGPQTLKETSFNQAYGRDLMEAQEWCRKYMKSGNVKDLXQAWDLYYHVFRRISKTS

SEQ ID NO: 595 - protein, 95 aa, Artificial Sequence
  source: /note="Description of Artificial Sequence: Synthetic polypeptide"
ILWHEMWHEGLIEASRLYFGERNVKGMFEVLEPLHAMMERGPQTLKETSFNQAYGRDLMEAQEWCRKYMKSGNVKDLLQAWDLYYHVFRRISKTS

SEQ ID NO: 596 - protein, 95 aa, Artificial Sequence
  source: /note="Description of Artificial Sequence: Synthetic polypeptide"
ILWHEMWHEGLLEASRLYFGERNVKGMFEVLEPLHAMMERGPQTLKETSFNQAYGRDLMEAQEWCRKYMKSGNVKDLLQAWDLYYHVFRRISKTS

SEQ ID NO: 597 - DNA, 521 bp, Artificial Sequence
  source: /note="Description of Artificial Sequence: Synthetic polynucleotide"
acccctctctccagccactaagccagttgctccctcggctgacggctgcacgcgaggcctccgaacgtcttacgccttgtggcgcgcccgtccttgtcccgggtgtgatggcggggtgtggggcggagggcgtggcggggaagggccggcgacgagagccgcgcgggacgactcgtcggcgataaccggtgtcgggtagcgccagccgcgcgacggtaacgagggaccgcgacaggcagacgctcccatgatcactctgcacgccgaaggcaaatagtgcaggccgtgcggcgcttggcgttccttggaagggctgaatccccgcctcgtccttcgcagcggccccccgggtgttcccatcgccgcttctaggcccactgcgacgcttgcctgcacttcttacacgctctgggtcccagccgcggcgacgcaaagggccttggtgcgggtctcgtcggcgcagggacgcgtttgggtcccgacggaaccttttccgcgttggggttggggcaccataagct

SEQ ID NO: 598 - DNA, 118 bp, Artificial Sequence
  source: /note="Description of Artificial Sequence: Synthetic polynucleotide"
acccctctctccagccactaagccagttgctccctcggctgacggctgcacgcgaggcctccgaacgtcttacgccttgtggcgcgcccgtccttgtcccgggtgtgatggcggggtg

SEQ ID NO: 599 - DNA, 221 bp, Artificial Sequence
  source: /note="Description of Artificial Sequence: Synthetic polynucleotide"
acccctctctccagccactaagccagttgctccctcggctgacggctgcacgcgaggcctccgaacgtcttacgccttgtggcgcgcccgtccttgtcccgggtgtgatggcggggtgtggggcggagggcgtggcggggaagggccggcgacgagagccgcgcgggacgactcgtcggcgataaccggtgtcgggtagcgccagccgcgcgacggtaacg

SEQ ID NO: 600 - DNA, 324 bp, Artificial Sequence
  source: /note="Description of Artificial Sequence: Synthetic polynucleotide"
acccctctctccagccactaagccagttgctccctcggctgacggctgcacgcgaggcctccgaacgtcttacgccttgtggcgcgcccgtccttgtcccgggtgtgatggcggggtgtggggcggagggcgtggcggggaagggccggcgacgagagccgcgcgggacgactcgtcggcgataaccggtgtcgggtagcgccagccgcgcgacggtaacgagggaccgcgacaggcagacgctcccatgatcactctgcacgccgaaggcaaatagtgcaggccgtgcggcgcttggcgttccttggaagggctgaatccccg

SEQ ID NO: 601 - DNA, 422 bp, Artificial Sequence
  source: /note="Description of Artificial Sequence: Synthetic polynucleotide"
acccctctctccagccactaagccagttgctccctcggctgacggctgcacgcgaggcctccgaacgtcttacgccttgtggcgcgcccgtccttgtcccgggtgtgatggcggggtgtggggcggagggcgtggcggggaagggccggcgacgagagccgcgcgggacgactcgtcggcgataaccggtgtcgggtagcgccagccgcgcgacggtaacgagggaccgcgacaggcagacgctcccatgatcactctgcacgccgaaggcaaatagtgcaggccgtgcggcgcttggcgttccttggaagggctgaatccccgcctcgtccttcgcagcggccccccgggtgttcccatcgccgcttctaggcccactgcgacgcttgcctgcacttcttacacgctctgggtcccagccg

SEQ ID NO: 602 - protein, 21 aa, Artificial Sequence
  source: /note="Description of Artificial Sequence: Synthetic peptide"
  VARIANT (1)..(3): /replace=" "
  misc_feature (1)..(21): /note="Variant residues given in the sequence have no preference with respect to those in the annotations for variant positions"
GSGEGRGSLLTCGDVEENPGP

SEQ ID NO: 603 - protein, 22 aa, Artificial Sequence
  source: /note="Description of Artificial Sequence: Synthetic peptide"
  VARIANT (1)..(3): /replace=" "
  misc_feature (1)..(21): /note="Variant residues given in the sequence have no preference with respect to those in the annotations for variant positions"
GSGATNFSLLKQAGDVEENPGP

SEQ ID NO: 604 - protein, 23 aa, Artificial Sequence
  source: /note="Description of Artificial Sequence: Synthetic peptide"
  VARIANT (1)..(3): /replace=" "
  misc_feature (1)..(21): /note="Variant residues given in the sequence have no preference with respect to those in the annotations for variant positions"
GSGQCTNYALLKLAGDVESNPGP

SEQ ID NO: 605 - protein, 25 aa, Artificial Sequence
  source: /note="Description of Artificial Sequence: Synthetic peptide"
  VARIANT (1)..(3): /replace=" "
  misc_feature (1)..(21): /note="Variant residues given in the sequence have no preference with respect to those in the annotations for variant positions"
GSGVKQTLNFDLLKLAGDVESNPGP

SEQ ID NO: 606 - protein, 1132 aa, Homo sapiens [sequence omitted]

SEQ ID NO: 607 - DNA, 4027 bp, Homo sapiens
caggcagcgtggtcctgctgcgcacgtgggaagccctggccccggccacccccgcgatgccgcgcgctccccgctgccgagccgtgcgctccctgctgcgcagccactaccgcgaggtgctgccgctggccacgttcgtgcggcgcctggggccccagggctggcggctggtgcagcgcggggacccggcggctttccgcgcgctggtggcccagtgcctggtgtgcgtgccctgggacgcacggccgccccccgccgccccctccttccgccaggtgtcctgcctgaaggagctggtggcccgagtgctgcagaggctgtgcgagcgcggcgcgaagaacgtgctggccttcggcttcgcgctgctggacggggcccgcgggggcccccccgaggccttcaccaccagcgtgcgcagctacctgcccaacacggtgaccgacgcactgcgggggagcggggcgtgggggctgctgttgcgccgcgtgggcgacgacgtgctggttcacctgctggcacgctgcgcgctctttgtgctggtggctcccagctgcgcctaccaggtgtgcgggccgccgctgtaccagctcggcgctgccactcaggcccggcccccgccacacgctagtggaccccgaaggcgtctgggatgcgaacgggcctggaaccatagcgtcagggaggccggggtccccctgggcctgccagccccgggtgcgaggaggcgcgggggcagtgccagccgaagtctgccgttgcccaagaggcccaggcgtggcgctgcccctgagccggagcggacgcccgttgggcaggggtcctgggcccacccgggcaggacgcgtggaccgagtgaccgtggtttctgtgtggtgtcacctgccagacccgccgaagaagccacctctttggagggtgcgctctctggcacgcgccactcccacccatccgtgggccgccagcaccacgcgggccccccatccacatcgcggccaccacgtccctgggacacgccttgtcccccggtgtacgccgagaccaagcacttcctctactcctcaggcgacaaggagcagctgcggccctccttcctactcagctctctgaggcccagcctgactggcgctcggaggctcgtggagaccatctttctgggttccaggccctggatgccagggactccccgcaggttgccccgcctgccccagcgctactggcaaatgcggcccctgtttctggagctgcttgggaaccacgcgcagtgcccctacggggtgctcctcaagacgcactgcccgctgcgagctgcggtcaccccagcagccggtgtctgtgcccgggagaagccccagggctctgtggcggcccccgaggaggaggacacagacccccgtcgcctggtgcagctgctccgccagcacagcagcccctggcaggtgtacggcttcgtgcgggcctgcctgcgccggctggtgcccccaggcctctggggctccaggcacaacgaacgccgcttcctcaggaacaccaagaagttcatctccctggggaagcatgccaagctctcgctgcaggagctgacgtggaagatgagcgtgcggggctgcgcttggctgcgcaggagcccaggggttggctgtgttccggccgcagagcaccgtctgcgtgaggagatcctggccaagttcctgcactggctgatgagtgtgtacgtcgtcgagctgctcaggtctttcttttatgtcacggagaccacgtttcaaaagaacaggctctttttctaccggaagagtgtctggagcaagttgcaaagcattggaatcagacagcacttgaagagggtgcagctgcgggagctgtcggaagcagaggtcaggcagcatcgggaagccaggcccgccctgctgacgtccagactccgcttcatccccaagcctgacgggctgcggccgattgtgaacatggactacgtcgtgggagccagaacgttccgcagagaaaagagggccgagcgtctcacctcgagggtgaaggcactgttcagcgtgctcaactacgagcgggcgcggcgccccggcctcctgggcgcctctgtgctgggcctggacgatatccacagggcctggcgcaccttcgtgctgcgtgtgcgggcccaggacccgccgcctgagctgtactttgtcaaggtggatgtgacgggcgcgtacgacaccatcccccaggacaggctcacggaggtcatcgccagcatcatcaaaccccagaacacgtactgcgtgcgtcggtatgccgtggtccagaaggccgcccatgggcacgtccgcaaggccttcaagagccacgtctctaccttgacagacctccagccgtacatgcgacagttcgtggctcacctgcaggagaccagcccgctgagggatgccgtcgtcatcgagcagagctcctccctgaatgaggccagcagtggcctcttcgacgtcttcctacgcttcatgtgccaccacgccgtgcgcatcaggggcaagtcctacgtccagtgccaggggatcccgcagggctccatcctctccacgctgctctgcagcctgtgctacggcgacatggagaacaagctgtttgcggggattcggcgggacgggctgctcctgcgtttggtggatgatttcttgttggtgacacctcacctcacccacgcgaaaaccttcctcaggaccctggtccgaggtgtccctgagtatggctgcgtggtgaacttgcggaagacagtggtgaacttccctgtagaagacgaggccctgggtggcacggcttttgttcagatgccggcccacggcctattcccctggtgcggcctgctgctggatacccggaccctggaggtgcagagcgactactccagctatgcccggacctccatcagagccagtctcaccttcaaccgcggcttcaaggctgggaggaacatgcgtcgcaaactctttggggtcttgcggctgaagtgtcacagcctgtttctggatttgcaggtgaacagcctccagacggtgtgcaccaacatctacaagatcctcctgctgcaggcgtacaggtttcacgcatgtgtgctgcagctcccatttcatcagcaagtttggaagaaccccacatttttcctgcgcgtcatctctgacacggcctccctctgctactccatcctgaaagccaagaacgcagggatgtcgctgggggccaagggcgccgccggccctctgccctccgaggccgtgcagtggctgtgccaccaagcattcctgctcaagctgactcgacaccgtgtcacctacgtgccactcctggggtcactcaggacagcccagacgcagctgagtcggaagctcccggggacgacgctgactgccctggaggccgcagccaacccggcactgccctcagacttcaagaccatcctggactgatggccacccgcccacagccaggccgagagcagacaccagcagccctgtcacgccgggctctacgtcccagggagggaggggcggcccacacccaggcccgcaccgctgggagtctgaggcctgagtgagtgtttggccgaggcctgcatgtccggctgaaggctgagtgtccggctgaggcctgagcgagtgtccagccaagggctgagtgtccagcacacctgccgtcttcacttccccacaggctggcgctcggctccaccccagggccagcttttcctcaccaggagcccggcttccactccccacataggaatagtccatccccagattcgccattgttcacccctcgccctgccctcctttgccttccacccccaccatccaggtggagaccctgagaaggaccctgggagctctgggaatttggagtgaccaaaggtgtgccctgtacacaggcgaggaccctgcacctggatgggggtccctgtgggtcaaattggggggaggtgctgtgggagtaaaatactgaatatatgagtttttcagttttgaaaaaaaaaaaaaaaaaa

SEQ ID NO: 608 - DNA, 19 bp, Artificial Sequence
  source: /note="Description of Artificial Sequence: Synthetic oligonucleotide"
ggaggtccctcaccttcta

SEQ ID NO: 609 - DNA, 19 bp, Artificial Sequence
  source: /note="Description of Artificial Sequence: Synthetic oligonucleotide"
cggaggatcttatgctgaa

SEQ ID NO: 610 - DNA, 19 bp, Artificial Sequence
  source: /note="Description of Artificial Sequence: Synthetic oligonucleotide"
cccgcttccagatcataca

SEQ ID NO: 611 - DNA, 19 bp, Artificial Sequence
  source: /note="Description of Artificial Sequence: Synthetic oligonucleotide"
ggagacctcaacaagatat

SEQ ID NO: 612 - DNA, 19 bp, Artificial Sequence
  source: /note="Description of Artificial Sequence: Synthetic oligonucleotide"
aaggcatggtcattggtat

SEQ ID NO: 613 - DNA, 19 bp, Artificial Sequence
  source: /note="Description of Artificial Sequence: Synthetic oligonucleotide"
gcatggtcattggtatcat

SEQ ID NO: 614 - DNA, 19 bp, Artificial Sequence
  source: /note="Description of Artificial Sequence: Synthetic oligonucleotide"
ggtcattggtatcatgagt

SEQ ID NO: 615 - DNA, 19 bp, Artificial Sequence
  source: /note="Description of Artificial Sequence: Synthetic oligonucleotide"
cctagtgggtatccctgta

SEQ ID NO: 616 - DNA, 19 bp, Artificial Sequence
  source: /note="Description of Artificial Sequence: Synthetic oligonucleotide"
gaggatggacattgttctt

SEQ ID NO: 617 - DNA, 19 bp, Artificial Sequence
  source: /note="Description of Artificial Sequence: Synthetic oligonucleotide"
gcatgcaggctacagttca

SEQ ID NO: 618 - DNA, 19 bp, Artificial Sequence
  source: /note="Description of Artificial Sequence: Synthetic oligonucleotide"
ccagcacatgcactgttga

SEQ ID NO: 619 - DNA, 19 bp, Artificial Sequence
  source: /note="Description of Artificial Sequence: Synthetic oligonucleotide"
cacatgcactgttgagtga

SEQ ID NO: 620 - DNA, 21 bp, Artificial Sequence
  source: /note="Description of Artificial Sequence: Synthetic oligonucleotide"
ctggaggtccctcaccttcta

SEQ ID NO: 621 - DNA, 21 bp, Artificial Sequence
  source: /note="Description of Artificial Sequence: Synthetic oligonucleotide"
gtcggaggatcttatgctgaa

SEQ ID NO: 622 - DNA, 21 bp, Artificial Sequence
  source: /note="Description of Artificial Sequence: Synthetic oligonucleotide"
tgcccgcttccagatcataca

SEQ ID NO: 623 - DNA, 21 bp, Artificial Sequence
  source: /note="Description of Artificial Sequence: Synthetic oligonucleotide"
ctggagacctcaacaagatat

SEQ ID NO: 624 - DNA, 21 bp, Artificial Sequence
  source: /note="Description of Artificial Sequence: Synthetic oligonucleotide"
tcaaggcatggtcattggtat

SEQ ID NO: 625 - DNA, 21 bp, Artificial Sequence
  source: /note="Description of Artificial Sequence: Synthetic oligonucleotide"
aggcatggtcattggtatcat

SEQ ID NO: 626 - DNA, 21 bp, Artificial Sequence
  source: /note="Description of Artificial Sequence: Synthetic oligonucleotide"
atggtcattggtatcatgagt

SEQ ID NO: 627 - DNA, 21 bp, Artificial Sequence
  source: /note="Description of Artificial Sequence: Synthetic oligonucleotide"
gccctagtgggtatccctgta

SEQ ID NO: 628 - DNA, 21 bp, Artificial Sequence
  source: /note="Description of Artificial Sequence: Synthetic oligonucleotide"
atgaggatggacattgttctt

SEQ ID NO: 629 - DNA, 21 bp, Artificial Sequence
  source: /note="Description of Artificial Sequence: Synthetic oligonucleotide"
gagcatgcaggctacagttca

SEQ ID NO: 630 - DNA, 21 bp, Artificial Sequence
  source: /note="Description of Artificial Sequence: Synthetic oligonucleotide"
ttccagcacatgcactgttga

SEQ ID NO: 631 - DNA, 21 bp, Artificial Sequence
  source: /note="Description of Artificial Sequence: Synthetic oligonucleotide"
agcacatgcactgttgagtga

SEQ ID NO: 632 - DNA, 21 bp, Artificial Sequence
  source: /note="Description of Artificial Sequence: Synthetic oligonucleotide"
tagaaggtgagggacctccag

SEQ ID NO: 633 - DNA, 21 bp, Artificial Sequence
  source: /note="Description of Artificial Sequence: Synthetic oligonucleotide"
ttcagcataagatcctccgac

SEQ ID NO: 634 - DNA, 21 bp, Artificial Sequence
  source: /note="Description of Artificial Sequence: Synthetic oligonucleotide"
tgtatgatctggaagcgggca

SEQ ID NO: 635 - DNA, 21 bp, Artificial Sequence
  source: /note="Description of Artificial Sequence: Synthetic oligonucleotide"
atatcttgttgaggtctccag

SEQ ID NO: 636 - DNA, 21 bp, Artificial Sequence
  source: /note="Description of Artificial Sequence: Synthetic oligonucleotide"
ataccaatgaccatgccttga

SEQ ID NO: 637 - DNA, 21 bp, Artificial Sequence
  source: /note="Description of Artificial Sequence: Synthetic oligonucleotide"
atgataccaatgaccatgcct

SEQ ID NO: 638 - DNA, 21 bp, Artificial Sequence
  source: /note="Description of Artificial Sequence: Synthetic oligonucleotide"
atggtcattggtatcatgagt

SEQ ID NO: 639 - DNA, 21 bp, Artificial Sequence
  source: /note="Description of Artificial Sequence: Synthetic oligonucleotide"
gccctagtgggtatccctgta

SEQ ID NO: 640 - DNA, 21 bp, Artificial Sequence
  source: /note="Description of Artificial Sequence: Synthetic oligonucleotide"
atgaggatggacattgttctt

SEQ ID NO: 641 - DNA, 21 bp, Artificial Sequence
  source: /note="Description of Artificial Sequence: Synthetic oligonucleotide"
gagcatgcaggctacagttca

SEQ ID NO: 642 - DNA, 21 bp, Artificial Sequence
  source: /note="Description of Artificial Sequence: Synthetic oligonucleotide"
ttccagcacatgcactgttga

SEQ ID NO: 643 - DNA, 21 bp, Artificial Sequence
  source: /note="Description of Artificial Sequence: Synthetic oligonucleotide"
agcacatgcactgttgagtga

SEQ ID NO: 644 - DNA, 19 bp, Artificial Sequence
  source: /note="Description of Artificial Sequence: Synthetic oligonucleotide"
tagaaggtgagggacctcc

SEQ ID NO: 645 - DNA, 19 bp, Artificial Sequence
  source: /note="Description of Artificial Sequence: Synthetic oligonucleotide"
ttcagcataagatcctccg

SEQ ID NO: 646 - DNA, 19 bp, Artificial Sequence
  source: /note="Description of Artificial Sequence: Synthetic oligonucleotide"
tgtatgatctggaagcggg

SEQ ID NO: 647 - DNA, 19 bp, Artificial Sequence
  source: /note="Description of Artificial Sequence: Synthetic oligonucleotide"
atatcttgttgaggtctcc

SEQ ID NO: 648 - DNA, 19 bp, Artificial Sequence
  source: /note="Description of Artificial Sequence: Synthetic oligonucleotide"
ataccaatgaccatgcctt

SEQ ID NO: 649 - DNA, 19 bp, Artificial Sequence
  source: /note="Description of Artificial Sequence: Synthetic oligonucleotide"
atgataccaatgaccatgc

SEQ ID NO: 650 - DNA, 19 bp, Artificial Sequence
  source: /note="Description of Artificial Sequence: Synthetic oligonucleotide"
atggtcattggtatcatga

SEQ ID NO: 651 - DNA, 19 bp, Artificial Sequence
  source: /note="Description of Artificial Sequence: Synthetic oligonucleotide"
gccctagtgggtatccctg

SEQ ID NO: 652 - DNA, 19 bp, Artificial Sequence
  source: /note="Description of Artificial Sequence: Synthetic oligonucleotide"
atgaggatggacattgttc

SEQ ID NO: 653 - DNA, 19 bp, Artificial Sequence
  source: /note="Description of Artificial Sequence: Synthetic oligonucleotide"
gagcatgcaggctacagtt

SEQ ID NO: 654 - DNA, 19 bp, Artificial Sequence
  source: /note="Description of Artificial Sequence: Synthetic oligonucleotide"
ttccagcacatgcactgtt

SEQ ID NO: 655 - DNA, 19 bp, Artificial Sequence
  source: /note="Description of Artificial Sequence: Synthetic oligonucleotide"
agcacatgcactgttgagt

SEQ ID NO: 656 - DNA, 19 bp, Artificial Sequence
  source: /note="Description of Artificial Sequence: Synthetic oligonucleotide"
ggccaggatggttcttaga

SEQ ID NO: 657 - DNA, 19 bp, Artificial Sequence
  source: /note="Description of Artificial Sequence: Synthetic oligonucleotide"
gcttcgtgctaaactggta

SEQ ID NO: 658 - DNA, 19 bp, Artificial Sequence
  source: /note="Description of Artificial Sequence: Synthetic oligonucleotide"
gggcgtgacttccacatga

SEQ ID NO: 659 - DNA, 19 bp, Artificial Sequence
  source: /note="Description of Artificial Sequence: Synthetic oligonucleotide"
caggcctagagaagtttca

SEQ ID NO: 660 - DNA, 19 bp, Artificial Sequence
  source: /note="Description of Artificial Sequence: Synthetic oligonucleotide"
cttggaacccattcctgaa

SEQ ID NO: 661 - DNA, 19 bp, Artificial Sequence
  source: /note="Description of Artificial Sequence: Synthetic oligonucleotide"
ggaacccattcctgaaatt

SEQ ID NO: 662 - DNA, 19 bp, Artificial Sequence
  source: /note="Description of Artificial Sequence: Synthetic oligonucleotide"
gaacccattcctgaaatta

SEQ ID NO: 663 - DNA, 19 bp, Artificial Sequence
  source: /note="Description of Artificial Sequence: Synthetic oligonucleotide"
aacccattcctgaaattat

SEQ ID NO: 664 - DNA, 19 bp, Artificial Sequence
  source: /note="Description of Artificial Sequence: Synthetic oligonucleotide"
acccattcctgaaattatt

SEQ ID NO: 665 - DNA, 19 bp, Artificial Sequence
  source: /note="Description of Artificial Sequence: Synthetic oligonucleotide"
cccattcctgaaattattt

SEQ ID NO: 666 - DNA, 19 bp, Artificial Sequence
  source: /note="Description of Artificial Sequence: Synthetic oligonucleotide"
ctgtggttctattatatta

SEQ ID NO: 667 - DNA, 19 bp, Artificial Sequence
  source: /note="Description of Artificial Sequence: Synthetic oligonucleotide"
aaatatgagagcatgctaa

SEQ ID NO: 668 - DNA, 19 bp, Artificial Sequence
  source: /note="Description of Artificial Sequence: Synthetic oligonucleotide"
tctaagaaccatcctggcc

SEQ ID NO: 669 - DNA, 19 bp, Artificial Sequence
  source: /note="Description of Artificial Sequence: Synthetic oligonucleotide"
taccagtttagcacgaagc

SEQ ID NO: 670 - DNA, 19 bp, Artificial Sequence
  source: /note="Description of Artificial Sequence: Synthetic oligonucleotide"
tcatgtggaagtcacgccc

SEQ ID NO: 671 - DNA, 19 bp, Artificial Sequence
  source: /note="Description of Artificial Sequence: Synthetic oligonucleotide"
tgaaacttctctaggcctg

SEQ ID NO: 672 - DNA, 19 bp, Artificial Sequence
  source: /note="Description of Artificial Sequence: Synthetic oligonucleotide"
ttcaggaatgggttccaag

SEQ ID NO: 673 - DNA, 19 bp, Artificial Sequence
  source: /note="Description of Artificial Sequence: Synthetic oligonucleotide"
aatttcaggaatgggttcc

SEQ ID NO: 674 - DNA, 19 bp, Artificial Sequence
  source: /note="Description of Artificial Sequence: Synthetic oligonucleotide"
taatttcaggaatgggttc

SEQ ID NO: 675 - DNA, 19 bp, Artificial Sequence
  source: /note="Description of Artificial Sequence: Synthetic oligonucleotide"
ataatttcaggaatgggtt

SEQ ID NO: 676 - DNA, 19 bp, Artificial Sequence
  source: /note="Description of Artificial Sequence: Synthetic oligonucleotide"
aataatttcaggaatgggt

SEQ ID NO: 677 - DNA, 19 bp, Artificial Sequence
  source: /note="Description of Artificial Sequence: Synthetic oligonucleotide"
aaataatttcaggaatggg

SEQ ID NO: 678 - DNA, 19 bp, Artificial Sequence
  source: /note="Description of Artificial Sequence: Synthetic oligonucleotide"
taatataatagaaccacag

SEQ ID NO: 679 - DNA, 19 bp, Artificial Sequence
  source: /note="Description of Artificial Sequence: Synthetic oligonucleotide"
ttagcatgctctcatattt

SEQ ID NO: 680 - DNA, 21 bp, Artificial Sequence
  source: /note="Description of Artificial Sequence: Synthetic oligonucleotide"
gcggccaggatggttcttaga

SEQ ID NO: 681 - DNA, 21 bp, Artificial Sequence
  source: /note="Description of Artificial Sequence: Synthetic oligonucleotide"
gagcttcgtgctaaactggta

SEQ ID NO: 682 - DNA, 21 bp, Artificial Sequence
  source: /note="Description of Artificial Sequence: Synthetic oligonucleotide"
acgggcgtgacttccacatga

SEQ ID NO: 683 - DNA, 21 bp, Artificial Sequence
  source: /note="Description of Artificial Sequence: Synthetic oligonucleotide"
tgcaggcctagagaagtttca

SEQ ID NO: 684 - DNA, 21 bp, Artificial Sequence
  source: /note="Description of Artificial Sequence: Synthetic oligonucleotide"
tccttggaacccattcctgaa

SEQ ID NO: 685 - DNA, 21 bp, Artificial Sequence
  source: /note="Description of Artificial Sequence: Synthetic oligonucleotide"
ttggaacccattcctgaaatt

SEQ ID NO: 686 - DNA, 21 bp, Artificial Sequence
  source: /note="Description of Artificial Sequence: Synthetic oligonucleotide"
tggaacccattcctgaaatta

SEQ ID NO: 687 - DNA, 21 bp, Artificial Sequence
  source: /note="Description of Artificial Sequence: Synthetic oligonucleotide"
ggaacccattcctgaaattat

SEQ ID NO: 688 - DNA, 21 bp, Artificial Sequence
  source: /note="Description of Artificial Sequence: Synthetic oligonucleotide"
gaacccattcctgaaattatt

SEQ ID NO: 689 - DNA, 21 bp, Artificial Sequence
  source: /note="Description of Artificial Sequence: Synthetic oligonucleotide"
aacccattcctgaaattattt

SEQ ID NO: 690 - DNA, 21 bp, Artificial Sequence
  source: /note="Description of Artificial Sequence: Synthetic oligonucleotide"
ccctgtggttctattatatta

SEQ ID NO: 691 - DNA, 21 bp, Artificial Sequence
  source: /note="Description of Artificial Sequence: Synthetic oligonucleotide"
ttaaatatgagagcatgctaa

SEQ ID NO: 692 - DNA, 21 bp, Artificial Sequence
  source: /note="Description of Artificial Sequence: Synthetic oligonucleotide"
tctaagaaccatcctggccgc

SEQ ID NO: 693 - DNA, 21 bp, Artificial Sequence
  source: /note="Description of Artificial Sequence: Synthetic oligonucleotide"
taccagtttagcacgaagctc

SEQ ID NO: 694 - DNA, 21 bp, Artificial Sequence
  source: /note="Description of Artificial Sequence: Synthetic oligonucleotide"
tcatgtggaagtcacgcccgt

SEQ ID NO: 695 - DNA, 21 bp, Artificial Sequence
  source: /note="Description of Artificial Sequence: Synthetic oligonucleotide"
tgaaacttctctaggcctgca

SEQ ID NO: 696 - DNA, 21 bp, Artificial Sequence
  source: /note="Description of Artificial Sequence: Synthetic oligonucleotide"
ttcaggaatgggttccaagga

SEQ ID NO: 697 - DNA, 21 bp, Artificial Sequence
  source: /note="Description of Artificial Sequence: Synthetic oligonucleotide"
aatttcaggaatgggttccaa

SEQ ID NO: 698 - DNA, 21 bp, Artificial Sequence
  source: /note="Description of Artificial Sequence: Synthetic oligonucleotide"
taatttcaggaatgggttcca

SEQ ID NO: 699 - DNA, 21 bp, Artificial Sequence
  source: /note="Description of Artificial Sequence: Synthetic oligonucleotide"
ataatttcaggaatgggttcc

SEQ ID NO: 700 - DNA, 21 bp, Artificial Sequence
  source: /note="Description of Artificial Sequence: Synthetic oligonucleotide"
aataatttcaggaatgggttc

SEQ ID NO: 701 - DNA, 21 bp, Artificial Sequence
  source: /note="Description of Artificial Sequence: Synthetic oligonucleotide"
aaataatttcaggaatgggtt

SEQ ID NO: 702 - DNA, 21 bp, Artificial Sequence
  source: /note="Description of Artificial Sequence: Synthetic oligonucleotide"
taatataatagaaccacaggg

SEQ ID NO: 703 - DNA, 21 bp, Artificial Sequence
  source: /note="Description of Artificial Sequence: Synthetic oligonucleotide"
ttagcatgctctcatatttaa

SEQ ID NO: 704 - protein, 18 aa, Artificial Sequence
  source: /note="Description of Artificial Sequence: Synthetic peptide"
GSTSGSGKPGSGEGSTKG

SEQ ID NO: 705 - skipped

SEQ ID NO: 706 - protein, 4 aa, Artificial Sequence
  source: /note="Description of Artificial Sequence: Synthetic peptide"
RGDS

SEQ ID NO: 707-708 - skipped (2 entries)

SEQ ID NO: 709 - protein, 40 aa, Artificial Sequence; identical to SEQ ID NO: 38
  source: /note="Description of Artificial Sequence: Synthetic polypeptide"
  MISC_FEATURE (1)..(40): /note="This sequence may encompass 1-10 'Gly Gly Gly Ser' repeating units"
  source: /note="See specification as filed for detailed description of substitutions and preferred embodiments"

SEQ ID NO: 710 - protein, 242 aa, Artificial Sequence
  source: /note="Description of Artificial Sequence: Synthetic polypeptide"
EIVMTQSPATLSLSPGERATLSCRASQDISKYLNWYQQKPGQAPRLLIYHTSRLHSGIPARFSGSGSGTDYTLTISSLQPEDFAVYFCQQGNTLPYTFGQGTKLEIKGGGGSGGGGSGGGGSQVQLQESGPGLVKPSETLSLTCTVSGVSLPDYGVSWIRQPPGKGLEWIGVIWGSETTYYSSSLKSRVTISKDNSKNQVSLKLSSVTAADTAVYYCAKHYYYGGSYAMDYWGQGTLVTVSS

SEQ ID NO: 711 - protein, 242 aa, Artificial Sequence
  source: /note="Description of Artificial Sequence: Synthetic polypeptide"
EIVMTQSPATLSLSPGERATLSCRASQDISKYLNWYQQKPGQAPRLLIYHTSRLHSGIPARFSGSGSGTDYTLTISSLQPEDFAVYFCQQGNTLPYTFGQGTKLEIKGGGGSGGGGSGGGGSQVQLQESGPGLVKPSETLSLTCTVSGVSLPDYGVSWIRQPPGKGLEWIGVIWGSETTYYQSSLKSRVTISKDNSKNQVSLKLSSVTAADTAVYYCAKHYYYGGSYAMDYWGQGTLVTVSS

SEQ ID NO: 712 - protein, 242 aa, Artificial Sequence
  source: /note="Description of Artificial Sequence: Synthetic polypeptide"
QVQLQESGPGLVKPSETLSLTCTVSGVSLPDYGVSWIRQPPGKGLEWIGVIWGSETTYYSSSLKSRVTISKDNSKNQVSLKLSSVTAADTAVYYCAKHYYYGGSYAMDYWGQGTLVTVSSGGGGSGGGGSGGGGSEIVMTQSPATLSLSPGERATLSCRASQDISKYLNWYQQKPGQAPRLLIYHTSRLHSGIPARFSGSGSGTDYTLTISSLQPEDFAVYFCQQGNTLPYTFGQGTKLEIK

SEQ ID NO: 713 - protein, 242 aa, Artificial Sequence
  source: /note="Description of Artificial Sequence: Synthetic polypeptide"
QVQLQESGPGLVKPSETLSLTCTVSGVSLPDYGVSWIRQPPGKGLEWIGVIWGSETTYYQSSLKSRVTISKDNSKNQVSLKLSSVTAADTAVYYCAKHYYYGGSYAMDYWGQGTLVTVSSGGGGSGGGGSGGGGSEIVMTQSPATLSLSPGERATLSCRASQDISKYLNWYQQKPGQAPRLLIYHTSRLHSGIPARFSGSGSGTDYTLTISSLQPEDFAVYFCQQGNTLPYTFGQGTKLEIK

SEQ ID NO: 714 - protein, 247 aa, Artificial Sequence
  source: /note="Description of Artificial Sequence: Synthetic polypeptide"
EIVMTQSPATLSLSPGERATLSCRASQDISKYLNWYQQKPGQAPRLLIYHTSRLHSGIPARFSGSGSGTDYTLTISSLQPEDFAVYFCQQGNTLPYTFGQGTKLEIKGGGGSGGGGSGGGGSGGGGSQVQLQESGPGLVKPSETLSLTCTVSGVSLPDYGVSWIRQPPGKGLEWIGVIWGSETTYYSSSLKSRVTISKDNSKNQVSLKLSSVTAADTAVYYCAKHYYYGGSYAMDYWGQGTLVTVSS

SEQ ID NO: 715 - protein, 247 aa, Artificial Sequence
  source: /note="Description of Artificial Sequence: Synthetic polypeptide"
EIVMTQSPATLSLSPGERATLSCRASQDISKYLNWYQQKPGQAPRLLIYHTSRLHSGIPARFSGSGSGTDYTLTISSLQPEDFAVYFCQQGNTLPYTFGQGTKLEIKGGGGSGGGGSGGGGSGGGGSQVQLQESGPGLVKPSETLSLTCTVSGVSLPDYGVSWIRQPPGKGLEWIGVIWGSETTYYQSSLKSRVTISKDNSKNQVSLKLSSVTAADTAVYYCAKHYYYGGSYAMDYWGQGTLVTVSS

SEQ ID NO: 716 - protein, 247 aa, Artificial Sequence
  source: /note="Description of Artificial Sequence: Synthetic polypeptide"
QVQLQESGPGLVKPSETLSLTCTVSGVSLPDYGVSWIRQPPGKGLEWIGVIWGSETTYYSSSLKSRVTISKDNSKNQVSLKLSSVTAADTAVYYCAKHYYYGGSYAMDYWGQGTLVTVSSGGGGSGGGGSGGGGSGGGGSEIVMTQSPATLSLSPGERATLSCRASQDISKYLNWYQQKPGQAPRLLIYHTSRLHSGIPARFSGSGSGTDYTLTISSLQPEDFAVYFCQQGNTLPYTFGQGTKLEIK

SEQ ID NO: 717 - protein, 247 aa, Artificial Sequence
  source: /note="Description of Artificial Sequence: Synthetic polypeptide"
QVQLQESGPGLVKPSETLSLTCTVSGVSLPDYGVSWIRQPPGKGLEWIGVIWGSETTYYQSSLKSRVTISKDNSKNQVSLKLSSVTAADTAVYYCAKHYYYGGSYAMDYWGQGTLVTVSSGGGGSGGGGSGGGGSGGGGSEIVMTQSPATLSLSPGERATLSCRASQDISKYLNWYQQKPGQAPRLLIYHTSRLHSGIPARFSGSGSGTDYTLTISSLQPEDFAVYFCQQGNTLPYTFGQGTKLEIK

SEQ ID NO: 718 - protein, 247 aa, Artificial Sequence
  source: /note="Description of Artificial Sequence: Synthetic polypeptide"
EIVMTQSPATLSLSPGERATLSCRASQDISKYLNWYQQKPGQAPRLLIYHTSRLHSGIPARFSGSGSGTDYTLTISSLQPEDFAVYFCQQGNTLPYTFGQGTKLEIKGGGGSGGGGSGGGGSGGGGSQVQLQESGPGLVKPSETLSLTCTVSGVSLPDYGVSWIRQPPGKGLEWIGVIWGSETTYYNSSLKSRVTISKDNSKNQVSLKLSSVTAADTAVYYCAKHYYYGGSYAMDYWGQGTLVTVSS

SEQ ID NO: 719 - protein, 247 aa, Artificial Sequence
  source: /note="Description of Artificial Sequence: Synthetic polypeptide"
QVQLQESGPGLVKPSETLSLTCTVSGVSLPDYGVSWIRQPPGKGLEWIGVIWGSETTYYNSSLKSRVTISKDNSKNQVSLKLSSVTAADTAVYYCAKHYYYGGSYAMDYWGQGTLVTVSSGGGGSGGGGSGGGGSGGGGSEIVMTQSPATLSLSPGERATLSCRASQDISKYLNWYQQKPGQAPRLLIYHTSRLHSGIPARFSGSGSGTDYTLTISSLQPEDFAVYFCQQGNTLPYTFGQGTKLEIK

SEQ ID NO: 720 - protein, 242 aa, Artificial Sequence
  source: /note="Description of Artificial Sequence: Synthetic polypeptide"
EIVMTQSPATLSLSPGERATLSCRASQDISKYLNWYQQKPGQAPRLLIYHTSRLHSGIPARFSGSGSGTDYTLTISSLQPEDFAVYFCQQGNTLPYTFGQGTKLEIKGGGGSGGGGSGGGGSQVQLQESGPGLVKPSETLSLTCTVSGVSLPDYGVSWIRQPPGKGLEWIGVIWGSETTYYNSSLKSRVTISKDNSKNQVSLKLSSVTAADTAVYYCAKHYYYGGSYAMDYWGQGTLVTVSS

SEQ ID NO: 721 - protein, 242 aa, Artificial Sequence
  source: /note="Description of Artificial Sequence: Synthetic polypeptide"
QVQLQESGPGLVKPSETLSLTCTVSGVSLPDYGVSWIRQPPGKGLEWIGVIWGSETTYYNSSLKSRVTISKDNSKNQVSLKLSSVTAADTAVYYCAKHYYYGGSYAMDYWGQGTLVTVSSGGGGSGGGGSGGGGSEIVMTQSPATLSLSPGERATLSCRASQDISKYLNWYQQKPGQAPRLLIYHTSRLHSGIPARFSGSGSGTDYTLTISSLQPEDFAVYFCQQGNTLPYTFGQGTKLEIK

SEQ ID NO: 722 - DNA, 813 bp, Artificial Sequence
  source: /note="Description of Artificial Sequence: Synthetic polynucleotide"
atggccctccctgtcaccgccctgctgcttccgctggctcttctgctccacgccgctcggcccgaaattgtgatgacccagtcacccgccactcttagcctttcacccggtgagcgcgcaaccctgtcttgcagagcctcccaagacatctcaaaataccttaattggtatcaacagaagcccggacaggctcctcgccttctgatctaccacaccagccggctccattctggaatccctgccaggttcagcggtagcggatctgggaccgactacaccctcactatcagctcactgcagccagaggacttcgctgtctatttctgtcagcaagggaacaccctgccctacacctttggacagggcaccaagctcgagattaaaggtggaggtggcagcggaggaggtgggtccggcggtggaggaagccaggtccaactccaagaaagcggaccgggtcttgtgaagccatcagaaactctttcactgacttgtactgtgagcggagtgtctctccccgattacggggtgtcttggatcagacagccaccggggaagggtctggaatggattggagtgatttggggctctgagactacttactactcttcatccctcaagtcacgcgtcaccatctcaaaggacaactctaagaatcaggtgtcactgaaactgtcatctgtgaccgcagccgacaccgccgtgtactattgcgctaagcattactattatggcgggagctacgcaatggattactggggacagggtactctggtcaccgtgtccagccaccaccatcatcaccatcaccat

SEQ ID NO: 723 - DNA, 813 bp, Artificial Sequence
  source: /note="Description of Artificial Sequence: Synthetic polynucleotide"
atggccctccctgtcaccgccctgctgcttccgctggctcttctgctccacgccgctcggcccgaaattgtgatgacccagtcacccgccactcttagcctttcacccggtgagcgcgcaaccctgtcttgcagagcctcccaagacatctcaaaataccttaattggtatcaacagaagcccggacaggctcctcgccttctgatctaccacaccagccggctccattctggaatccctgccaggttcagcggtagcggatctgggaccgactacaccctcactatcagctcactgcagccagaggacttcgctgtctatttctgtcagcaagggaacaccctgccctacacctttggacagggcaccaagctcgagattaaaggtggaggtggcagcggaggaggtgggtccggcggtggaggaagccaggtccaactccaagaaagcggaccgggtcttgtgaagccatcagaaactctttcactgacttgtactgtgagcggagtgtctctccccgattacggggtgtcttggatcagacagccaccggggaagggtctggaatggattggagtgatttggggctctgagactacttactaccaatcatccctcaagtcacgcgtcaccatctcaaaggacaactctaagaatcaggtgtcactgaaactgtcatctgtgaccgcagccgacaccgccgtgtactattgcgctaagcattactattatggcgggagctacgcaatggattactggggacagggtactctggtcaccgtgtccagccaccaccatcatcaccatcaccat

SEQ ID NO: 724 - DNA, 813 bp, Artificial Sequence
  source: /note="Description of Artificial Sequence: Synthetic polynucleotide"
atggctctgcccgtgaccgcactcctcctgccactggctctgctgcttcacgccgctcgcccacaagtccagcttcaagaatcagggcctggtctggtgaagccatctgagactctgtccctcacttgcaccgtgagcggagtgtccctcccagactacggagtgagctggattagacagcctcccggaaagggactggagtggatcggagtgatttggggtagcgaaaccacttactattcatcttccctgaagtcacgggtcaccatttcaaaggataactcaaagaatcaagtgagcctcaagctctcatcagtcaccgccgctgacaccgccgtgtattactgtgccaagcattactactatggagggtcctacgccatggactactggggccagggaactctggtcactgtgtcatctggtggaggaggtagcggaggaggcgggagcggtggaggtggctccgaaatcgtgatgacccagagccctgcaaccctgtccctttctcccggggaacgggctaccctttcttgtcgggcatcacaagatatctcaaaatacctcaattggtatcaacagaagccgggacaggcccctaggcttcttatctaccacacctctcgcctgcatagcgggattcccgcacgctttagcgggtctggaagcgggaccgactacactctgaccatctcatctctccagcccgaggacttcgccgtctacttctgccagcagggtaacaccctgccgtacaccttcggccagggcaccaagcttgagatcaaacatcaccaccatcatcaccatcac

SEQ ID NO: 725 - DNA, 813 bp, Artificial Sequence
  source: /note="Description of Artificial Sequence: Synthetic polynucleotide"
atggctctgcccgtgaccgcactcctcctgccactggctctgctgcttcacgccgctcgcccacaagtccagcttcaagaatcagggcctggtctggtgaagccatctgagactctgtccctcacttgcaccgtgagcggagtgtccctcccagactacggagtgagctggattagacagcctcccggaaagggactggagtggatcggagtgatttggggtagcgaaaccacttactatcaatcttccctgaagtcacgggtcaccatttcaaaggataactcaaagaatcaagtgagcctcaagctctcatcagtcaccgccgctgacaccgccgtgtattactgtgccaagcattactactatggagggtcctacgccatggactactggggccagggaactctggtcactgtgtcatctggtggaggaggtagcggaggaggcgggagcggtggaggtggctccgaaatcgtgatgacccagagccctgcaaccctgtccctttctcccggggaacgggctaccctttcttgtcgggcatcacaagatatctcaaaatacctcaattggtatcaacagaagccgggacaggcccctaggcttcttatctaccacacctctcgcctgcatagcgggattcccgcacgctttagcgggtctggaagcgggaccgactacactctgaccatctcatctctccagcccgaggacttcgccgtctacttctgccagcagggtaacaccctgccgtacaccttcggccagggcaccaagcttgagatcaaacatcaccaccatcatcaccatcac

SEQ ID NO: 726 - DNA, 828 bp, Artificial Sequence
  source: /note="Description of Artificial Sequence: Synthetic polynucleotide"
atggccctcccagtgaccgctctgctgctgcctctcgcacttcttctccatgccgctcggcctgagatcgtcatgacccaaagccccgctaccctgtccctgtcacccggcgagagggcaaccctttcatgcagggccagccaggacatttctaagtacctcaactggtatcagcagaagccagggcaggctcctcgcctgctgatctaccacaccagccgcctccacagcggtatccccgccagattttccgggagcgggtctggaaccgactacaccctcaccatctcttctctgcagcccgaggatttcgccgtctatttctgccagcaggggaatactctgccgtacaccttcggtcaaggtaccaagctggaaatcaagggaggcggaggatcaggcggtggcggaagcggaggaggtggctccggaggaggaggttcccaagtgcagcttcaagaatcaggacccggacttgtgaagccatcagaaaccctctccctgacttgtaccgtgtccggtgtgagcctccccgactacggagtctcttggattcgccagcctccggggaagggtcttgaatggattggggtgatttggggatcagagactacttactactcttcatcacttaagtcacgggtcaccatcagcaaagataatagcaagaaccaagtgtcacttaagctgtcatctgtgaccgccgctgacaccgccgtgtactattgtgccaaacattactattacggagggtcttatgctatggactactggggacaggggaccctggtgactgtctctagccatcaccatcaccaccatcatcac

SEQ ID NO: 727 - DNA, 828 bp, Artificial Sequence
  source: /note="Description of Artificial Sequence: Synthetic polynucleotide"
atggccctcccagtgaccgctctgctgctgcctctcgcacttcttctccatgccgctcggcctgagatcgtcatgacccaaagccccgctaccctgtccctgtcacccggcgagagggcaaccctttcatgcagggccagccaggacatttctaagtacctcaactggtatcagcagaagccagggcaggctcctcgcctgctgatctaccacaccagccgcctccacagcggtatccccgccagattttccgggagcgggtctggaaccgactacaccctcaccatctcttctctgcagcccgaggatttcgccgtctatttctgccagcaggggaatactctgccgtacaccttcggtcaaggtaccaagctggaaatcaagggaggcggaggatcaggcggtggcggaagcggaggaggtggctccggaggaggaggttcccaagtgcagcttcaagaatcaggacccggacttgtgaagccatcagaaaccctctccctgacttgtaccgtgtccggtgtgagcctccccgactacggagtctcttggattcgccagcctccggggaagggtcttgaatggattggggtgatttggggatcagagactacttactaccagtcatcacttaagtcacgggtcaccatcagcaaagataatagcaagaaccaagtgtcacttaagctgtcatctgtgaccgccgctgacaccgccgtgtactattgtgccaaacattactattacggagggtcttatgctatggactactggggacaggggaccctggtgactgtctctagccatcaccatcaccaccatcatcac

SEQ ID NO: 728 - DNA, 828 bp, Artificial Sequence
  source: /note="Description of Artificial Sequence: Synthetic polynucleotide"
atggcactgcctgtcactgccctcctgctgcctctggccctccttctgcatgccgccaggccccaagtccagctgcaagagtcaggacccggactggtgaagccgtctgagactctctcactgacttgtaccgtcagcggcgtgtccctccccgactacggagtgtcatggatccgccaacctcccgggaaagggcttgaatggattggtgtcatctggggttctgaaaccacctactactcatcttccctgaagtccagggtgaccatcagcaaggataattccaagaaccaggtcagccttaagctgtcatctgtgaccgctgctgacaccgccgtgtattactgcgccaagcactactattacggaggaagctacgctatggactattggggacagggcactctcgtgactgtgagcagcggcggtggagggtctggaggtggaggatccggtggtggtgggtcaggcggaggagggagcgagattgtgatgactcagtcaccagccaccctttctctttcacccggcgagagagcaaccctgagctgtagagccagccaggacatttctaagtacctcaactggtatcagcaaaaaccggggcaggcccctcgcctcctgatctaccatacctcacgccttcactctggtatccccgctcggtttagcggatcaggatctggtaccgactacactctgaccatttccagcctgcagccagaagatttcgcagtgtatttctgccagcagggcaatacccttccttacaccttcggtcagggaaccaagctcgaaatcaagcaccatcaccatcatcaccaccat

SEQ ID NO: 729 - DNA, 828 bp, Artificial Sequence
  source: /note="Description of Artificial Sequence: Synthetic polynucleotide"
atggcactgcctgtcactgccctcctgctgcctctggccctccttctgcatgccgccaggccccaagtccagctgcaagagtcaggacccggactggtgaagccgtctgagactctctcactgacttgtaccgtcagcggcgtgtccctccccgactacggagtgtcatggatccgccaacctcccgggaaagggcttgaatggattggtgtcatctggggttctgaaaccacctactaccagtcttccctgaagtccagggtgaccatcagcaaggataattccaagaaccaggtcagccttaagctgtcatctgtgaccgctgctgacaccgccgtgtattactgcgccaagcactactattacggaggaagctacgctatggactattggggacagggcactctcgtgactgtgagcagcggcggtggagggtctggaggtggaggatccggtggtggtgggtcaggcggaggagggagcgagattgtgatgactcagtcaccagccaccctttctctttcacccggcgagagagcaaccctgagctgtagagccagccaggacatttctaagtacctcaactggtatcagcaaaaaccggggcaggcccctcgcctcctgatctaccatacctcacgccttcactctggtatccccgctcggtttagcggatcaggatctggtaccgactacactctgaccatttccagcctgcagccagaagatttcgcagtgtatttctgccagcagggcaatacccttccttacaccttcggtcagggaaccaagctcgaaatcaagcaccatcaccatcatcatcaccac

SEQ ID NO: 730 - DNA, 828 bp, Artificial Sequence
  source: /note="Description of Artificial Sequence: Synthetic polynucleotide"
atggccctcccagtgaccgctctgctgctgcctctcgcacttcttctccatgccgctcggcctgagatcgtcatgacccaaagccccgctaccctgtccctgtcacccggcgagagggcaaccctttcatgcagggccagccaggacatttctaagtacctcaactggtatcagcagaagccagggcaggctcctcgcctgctgatctaccacaccagccgcctccacagcggtatccccgccagattttccgggagcgggtctggaaccgactacaccctcaccatctcttctctgcagcccgaggatttcgccgtctatttctgccagcaggggaatactctgccgtacaccttcggtcaaggtaccaagctggaaatcaagggaggcggaggatcaggcggtggcggaagcggaggaggtggctccggaggaggaggttcccaagtgcagcttcaagaatcaggacccggacttgtgaagccatcagaaaccctctccctgacttgtaccgtgtccggtgtgagcctccccgactacggagtctcttggattcgccagcctccggggaagggtcttgaatggattggggtgatttggggatcagagactacttactacaattcatcacttaagtcacgggtcaccatcagcaaagataatagcaagaaccaagtgtcacttaagctgtcatctgtgaccgccgctgacaccgccgtgtactattgtgccaaacattactattacggagggtcttatgctatggactactggggacaggggaccctggtgactgtctctagccatcaccatcaccaccatcatcac

SEQ ID NO: 731 - DNA, 828 bp, Artificial Sequence
  source: /note="Description of Artificial Sequence: Synthetic polynucleotide"
atggcactgcctgtcactgccctcctgctgcctctggccctccttctgcatgccgccaggccccaagtccagctgcaagagtcaggacccggactggtgaagccgtctgagactctctcactgacttgtaccgtcagcggcgtgtccctccccgactacggagtgtcatggatccgccaacctcccgggaaagggcttgaatggattggtgtcatctggggttctgaaaccacctactacaactcttccctgaagtccagggtgaccatcagcaaggataattccaagaaccaggtcagccttaagctgtcatctgtgaccgctgctgacaccgccgtgtattactgcgccaagcactactattacggaggaagctacgctatggactattggggacagggcactctcgtgactgtgagcagcggcggtggagggtctggaggtggaggatccggtggtggtgggtcaggcggaggagggagcgagattgtgatgactcagtcaccagccaccctttctctttcacccggcgagagagcaaccctgagctgtagagccagccaggacatttctaagtacctcaactggtatcagcaaaaaccggggcaggcccctcgcctcctgatctaccatacctcacgccttcactctggtatccccgctcggtttagcggatcaggatctggtaccgactacactctgaccatttccagcctgcagccagaagatttcgcagtgtatttctgccagcagggcaatacccttccttacaccttcggtcagggaaccaagctcgaaatcaagcaccatcaccatcatcaccaccat

SEQ ID NO: 732 - DNA, 813 bp, Artificial Sequence
  source: /note="Description of Artificial Sequence: Synthetic polynucleotide"
atggccctccctgtcaccgccctgctgcttccgctggctcttctgctccacgccgctcggcccgaaattgtgatgacccagtcacccgccactcttagcctttcacccggtgagcgcgcaaccctgtcttgcagagcctcccaagacatctcaaaataccttaattggtatcaacagaagcccggacaggctcctcgccttctgatctaccacaccagccggctccattctggaatccctgccaggttcagcggtagcggatctgggaccgactacaccctcactatcagctcactgcagccagaggacttcgctgtctatttctgtcagcaagggaacaccctgccctacacctttggacagggcaccaagctcgagattaaaggtggaggtggcagcggaggaggtgggtccggcggtggaggaagccaggtccaactccaagaaagcggaccgggtcttgtgaagccatcagaaactctttcactgacttgtactgtgagcggagtgtctctccccgattacggggtgtcttggatcagacagccaccggggaagggtctggaatggattggagtgatttggggctctgagactacttactacaattcatccctcaagtcacgcgtcaccatctcaaaggacaactctaagaatcaggtgtcactgaaactgtcatctgtgaccgcagccgacaccgccgtgtactattgcgctaagcattactattatggcgggagctacgcaatggattactggggacagggtactctggtcaccgtgtccagccaccaccatcatcaccatcaccat

SEQ ID NO: 733 - DNA, 813 bp, Artificial Sequence
  source: /note="Description of Artificial Sequence: Synthetic polynucleotide"
atggctctgcccgtgaccgcactcctcctgccactggctctgctgcttcacgccgctcgcccacaagtccagcttcaagaatcagggcctggtctggtgaagccatctgagactctgtccctcacttgcaccgtgagcggagtgtccctcccagactacggagtgagctggattagacagcctcccggaaagggactggagtggatcggagtgatttggggtagcgaaaccacttactataactcttccctgaagtcacgggtcaccatttcaaaggataactcaaagaatcaagtgagcctcaagctctcatcagtcaccgccgctgacaccgccgtgtattactgtgccaagcattactactatggagggtcctacgccatggactactggggccagggaactctggtcactgtgtcatctggtggaggaggtagcggaggaggcgggagcggtggaggtggctccgaaatcgtgatgacccagagccctgcaaccctgtccctttctcccggggaacgggctaccctttcttgtcgggcatcacaagatatctcaaaatacctcaattggtatcaacagaagccgggacaggcccctaggcttcttatctaccacacctctcgcctgcatagcgggattcccgcacgctttagcgggtctggaagcgggaccgactacactctgaccatctcatctctccagcccgaggacttcgccgtctacttctgccagcagggtaacaccctgccgtacaccttcggccagggcaccaagcttgagatcaaacatcaccaccatcatcaccatcac

SEQ ID NO: 734 - protein, 271 aa, Artificial Sequence
  source: /note="Description of Artificial Sequence: Synthetic polypeptide"
MALPVTALLLPLALLLHAARPEIVMTQSPATLSLSPGERATLSCRASQDISKYLNWYQQKPGQAPRLLIYHTSRLHSGIPARFSGSGSGTDYTLTISSLQPEDFAVYFCQQGNTLPYTFGQGTKLEIKGGGGSGGGGSGGGGSQVQLQESGPGLVKPSETLSLTCTVSGVSLPDYGVSWIRQPPGKGLEWIGVIWGSETTYYSSSLKSRVTISKDNSKNQVSLKLSSVTAADTAVYYCAKHYYYGGSYAMDYWGQGTLVTVSSHHHHHHHH

SEQ ID NO: 735 - protein, 271 aa, Artificial Sequence
  source: /note="Description of Artificial Sequence: Synthetic polypeptide"
MALPVTALLLPLALLLHAARPEIVMTQSPATLSLSPGERATLSCRASQDISKYLNWYQQKPGQAPRLLIYHTSRLHSGIPARFSGSGSGTDYTLTISSLQPEDFAVYFCQQGNTLPYTFGQGTKLEIKGGGGSGGGGSGGGGSQVQLQESGPGLVKPSETLSLTCTVSGVSLPDYGVSWIRQPPGKGLEWIGVIWGSETTYYQSSLKSRVTISKDNSKNQVSLKLSSVTAADTAVYYCAKHYYYGGSYAMDYWGQGTLVTVSSHHHHHHHH

SEQ ID NO: 736 - protein, 271 aa, Artificial Sequence
  source: /note="Description of Artificial Sequence: Synthetic polypeptide"
MALPVTALLLPLALLLHAARPQVQLQESGPGLVKPSETLSLTCTVSGVSLPDYGVSWIRQPPGKGLEWIGVIWGSETTYYSSSLKSRVTISKDNSKNQVSLKLSSVTAADTAVYYCAKHYYYGGSYAMDYWGQGTLVTVSSGGGGSGGGGSGGGGSEIVMTQSPATLSLSPGERATLSCRASQDISKYLNWYQQKPGQAPRLLIYHTSRLHSGIPARFSGSGSGTDYTLTISSLQPEDFAVYFCQQGNTLPYTFGQGTKLEIKHHHHHHHH

SEQ ID NO: 737 - protein, 271 aa, Artificial Sequence
  source: /note="Description of Artificial Sequence: Synthetic polypeptide"
MALPVTALLLPLALLLHAARPQVQLQESGPGLVKPSETLSLTCTVSGVSLPDYGVSWIRQPPGKGLEWIGVIWGSETTYYQSSLKSRVTISKDNSKNQVSLKLSSVTAADTAVYYCAKHYYYGGSYAMDYWGQGTLVTVSSGGGGSGGGGSGGGGSEIVMTQSPATLSLSPGERATLSCRASQDISKYLNWYQQKPGQAPRLLIYHTSRLHSGIPARFSGSGSGTDYTLTISSLQPEDFAVYFCQQGNTLPYTFGQGTKLEIKHHHHHHHH

SEQ ID NO: 738 - protein, 276 aa, Artificial Sequence
  source: /note="Description of Artificial Sequence: Synthetic polypeptide"
MALPVTALLLPLALLLHAARPEIVMTQSPATLSLSPGERATLSCRASQDISKYLNWYQQKPGQAPRLLIYHTSRLHSGIPARFSGSGSGTDYTLTISSLQPEDFAVYFCQQGNTLPYTFGQGTKLEIKGGGGSGGGGSGGGGSGGGGSQVQLQESGPGLVKPSETLSLTCTVSGVSLPDYGVSWIRQPPGKGLEWIGVIWGSETTYYSSSLKSRVTISKDNSKNQVSLKLSSVTAADTAVYYCAKHYYYGGSYAMDYWGQGTLVTVSSHHHHHHHH

SEQ ID NO: 739 - protein, 276 aa, Artificial Sequence
  source: /note="Description of Artificial Sequence: Synthetic polypeptide"
MALPVTALLLPLALLLHAARPEIVMTQSPATLSLSPGERATLSCRASQDISKYLNWYQQKPGQAPRLLIYHTSRLHSGIPARFSGSGSGTDYTLTISSLQPEDFAVYFCQQGNTLPYTFGQGTKLEIKGGGGSGGGGSGGGGSGGGGSQVQLQESGPGLVKPSETLSLTCTVSGVSLPDYGVSWIRQPPGKGLEWIGVIWGSETTYYQSSLKSRVTISKDNSKNQVSLKLSSVTAADTAVYYCAKHYYYGGSYAMDYWGQGTLVTVSSHHHHHHHH

SEQ ID NO: 740 - protein, 276 aa, Artificial Sequence
  source: /note="Description of Artificial Sequence: Synthetic polypeptide"
MALPVTALLLPLALLLHAARPQVQLQESGPGLVKPSETLSLTCTVSGVSLPDYGVSWIRQPPGKGLEWIGVIWGSETTYYSSSLKSRVTISKDNSKNQVSLKLSSVTAADTAVYYCAKHYYYGGSYAMDYWGQGTLVTVSSGGGGSGGGGSGGGGSGGGGSEIVMTQSPATLSLSPGERATLSCRASQDISKYLNWYQQKPGQAPRLLIYHTSRLHSGIPARFSGSGSGTDYTLTISSLQPEDFAVYFCQQGNTLPYTFGQGTKLEIKHHHHHHHH

SEQ ID NO: 741 - protein, 276 aa, Artificial Sequence
  source: /note="Description of Artificial Sequence: Synthetic polypeptide"
MALPVTALLLPLALLLHAARPQVQLQESGPGLVKPSETLSLTCTVSGVSLPDYGVSWIRQPPGKGLEWIGVIWGSETTYYQSSLKSRVTISKDNSKNQVSLKLSSVTAADTAVYYCAKHYYYGGSYAMDYWGQGTLVTVSSGGGGSGGGGSGGGGSGGGGSEIVMTQSPATLSLSPGERATLSCRASQDISKYLNWYQQKPGQAPRLLIYHTSRLHSGIPARFSGSGSGTDYTLTISSLQPEDFAVYFCQQGNTLPYTFGQGTKLEIKHHHHHHHH

SEQ ID NO: 742 - protein, 276 aa, Artificial Sequence
  source: /note="Description of Artificial Sequence: Synthetic polypeptide"
MALPVTALLLPLALLLHAARPEIVMTQSPATLSLSPGERATLSCRASQDISKYLNWYQQKPGQAPRLLIYHTSRLHSGIPARFSGSGSGTDYTLTISSLQPEDFAVYFCQQGNTLPYTFGQGTKLEIKGGGGSGGGGSGGGGSGGGGSQVQLQESGPGLVKPSETLSLTCTVSGVSLPDYGVSWIRQPPGKGLEWIGVIWGSETTYYNSSLKSRVTISKDNSKNQVSLKLSSVTAADTAVYYCAKHYYYGGSYAMDYWGQGTLVTVSSHHHHHHHH

SEQ ID NO: 743 - protein, 276 aa, Artificial Sequence
  source: /note="Description of Artificial Sequence: Synthetic polypeptide"
MALPVTALLLPLALLLHAARPQVQLQESGPGLVKPSETLSLTCTVSGVSLPDYGVSWIRQPPGKGLEWIGVIWGSETTYYNSSLKSRVTISKDNSKNQVSLKLSSVTAADTAVYYCAKHYYYGGSYAMDYWGQGTLVTVSSGGGGSGGGGSGGGGSGGGGSEIVMTQSPATLSLSPGERATLSCRASQDISKYLNWYQQKPGQAPRLLIYHTSRLHSGIPARFSGSGSGTDYTLTISSLQPEDFAVYFCQQGNTLPYTFGQGTKLEIKHHHHHHHH

SEQ ID NO: 744 - protein, 271 aa, Artificial Sequence
  source: /note="Description of Artificial Sequence: Synthetic polypeptide"
MALPVTALLLPLALLLHAARPEIVMTQSPATLSLSPGERATLSCRASQDISKYLNWYQQKPGQAPRLLIYHTSRLHSGIPARFSGSGSGTDYTLTISSLQPEDFAVYFCQQGNTLPYTFGQGTKLEIKGGGGSGGGGSGGGGSQVQLQESGPGLVKPSETLSLTCTVSGVSLPDYGVSWIRQPPGKGLEWIGVIWGSETTYYNSSLKSRVTISKDNSKNQVSLKLSSVTAADTAVYYCAKHYYYGGSYAMDYWGQGTLVTVSSHHHHHHHH

SEQ ID NO: 745 - protein, 271 aa, Artificial Sequence
  source: /note="Description of Artificial Sequence: Synthetic polypeptide"
MALPVTALLLPLALLLHAARPQVQLQESGPGLVKPSETLSLTCTVSGVSLPDYGVSWIRQPPGKGLEWIGVIWGSETTYYNSSLKSRVTISKDNSKNQVSLKLSSVTAADTAVYYCAKHYYYGGSYAMDYWGQGTLVTVSSGGGGSGGGGSGGGGSEIVMTQSPATLSLSPGERATLSCRASQDISKYLNWYQQKPGQAPRLLIYHTSRLHSGIPARFSGSGSGTDYTLTISSLQPEDFAVYFCQQGNTLPYTFGQGTKLEIKHHHHHHHH

SEQ ID NO: 746 - DNA, 1458 bp, Artificial Sequence
  source: /note="Description of Artificial Sequence: Synthetic polynucleotide"
atggccctccctgtcaccgccctgctgcttccgctggctcttctgctccacgccgctcggcccgaaattgtgatgacccagtcacccgccactcttagcctttcacccggtgagcgcgcaaccctgtcttgcagagcctcccaagacatctcaaaataccttaattggtatcaacagaagcccggacaggctcctcgccttctgatctaccacaccagccggctccattctggaatccctgccaggttcagcggtagcggatctgggaccgactacaccctcactatcagctcactgcagccagaggacttcgctgtctatttctgtcagcaagggaacaccctgccctacacctttggacagggcaccaagctcgagattaaaggtggaggtggcagcggaggaggtgggtccggcggtggaggaagccaggtccaactccaagaaagcggaccgggtcttgtgaagccatcagaaactctttcactgacttgtactgtgagcggagtgtctctccccgattacggggtgtcttggatcagacagccaccggggaagggtctggaatggattggagtgatttggggctctgagactacttactactcttcatccctcaagtcacgcgtcaccatctcaaaggacaactctaagaatcaggtgtcactgaaactgtcatctgtgaccgcagccgacaccgccgtgtactattgcgctaagcattactattatggcgggagctacgcaatggattactggggacagggtactctggtcaccgtgtccagcaccactaccccagcaccgaggccacccaccccggctcctaccatcgcctcccagcctctgtccctgcgtccggaggcatgtagacccgcagctggtggggccgtgcatacccggggtcttgacttcgcctgcgatatctacatttgggcccctctggctggtacttgcggggtcctgctgctttcactcgtgatcactctttactgtaagcgcggtcggaagaagctgctgtacatctttaagcaacccttcatgaggcctgtgcagactactcaagaggaggacggctgttcatgccggttcccagaggaggaggaaggcggctgcgaactgcgcgtgaaattcagccgcagcgcagatgctccagcctacaagcaggggcagaaccagctctacaacgaactcaatcttggtcggagagaggagtacgacgtgctggacaagcggagaggacgggacccagaaatgggcgggaagccgcgcagaaagaatccccaagagggcctgtacaacgagctccaaaaggataagatggcagaagcctatagcgagattggtatgaaaggggaacgcagaagaggcaaaggccacgacggactgtaccagggactcagcaccgccaccaaggacacctatgacgctcttcacatgcaggccctgccgcctcgg

SEQ ID NO: 747 - DNA, 1458 bp, Artificial Sequence
  source: /note="Description of Artificial Sequence: Synthetic polynucleotide"
atggccctccctgtcaccgccctgctgcttccgctggctcttctgctccacgccgctcggcccgaaattgtgatgacccagtcacccgccactcttagcctttcacccggtgagcgcgcaaccctgtcttgcagagcctcccaagacatctcaaaataccttaattggtatcaacagaagcccggacaggctcctcgccttctgatctaccacaccagccggctccattctggaatccctgccaggttcagcggtagcggatctgggaccgactacaccctcactatcagctcactgcagccagaggacttcgctgtctatttctgtcagcaagggaacaccctgccctacacctttggacagggcaccaagctcgagattaaaggtggaggtggcagcggaggaggtgggtccggcggtggaggaagccaggtccaactccaagaaagcggaccgggtcttgtgaagccatcagaaactctttcactgacttgtactgtgagcggagtgtctctccccgattacggggtgtcttggatcagacagccaccggggaagggtctggaatggattggagtgatttggggctctgagactacttactaccaatcatccctcaagtcacgcgtcaccatctcaaaggacaactctaagaatcaggtgtcactgaaactgtcatctgtgaccgcagccgacaccgccgtgtactattgcgctaagcattactattatggcgggagctacgcaatggattactggggacagggtactctggtcaccgtgtccagcaccactaccccagcaccgaggccacccaccccggctcctaccatcgcctcccagcctctgtccctgcgtccggaggcatgtagacccgcagctggtggggccgtgcatacccggggtcttgacttcgcctgcgatatctacatttgggcccctctggctggtacttgcggggtcctgctgctttcactcgtgatcactctttactgtaagcgcggtcggaagaagctgctgtacatctttaagcaacccttcatgaggcctgtgcagactactcaagaggaggacggctgttcatgccggttcccagaggaggaggaaggcggctgcgaactgcgcgtgaaattcagccgcagcgcagatgctccagcctacaagcaggggcagaaccagctctacaacgaactcaatcttggtcggagagaggagtacgacgtgctggacaagcggagaggacgggacccagaaatgggcgggaagccgcgcagaaagaatccccaagagggcctgtacaacgagctccaaaaggataagatggcagaagcctatagcgagattggtatgaaaggggaacgcagaagaggcaaaggccacgacggactgtaccagggactcagcaccgccaccaaggacacctatgacgctcttcacatgcaggccctgccgcctcgg

SEQ ID NO: 748 - DNA, 1458 bp, Artificial Sequence
  source: /note="Description of Artificial Sequence: Synthetic polynucleotide"
atggctctgcccgtgaccgcactcctcctgccactggctctgctgcttcacgccgctcgcccacaagtccagcttcaagaatcagggcctggtctggtgaagccatctgagactctgtccctcacttgcaccgtgagcggagtgtccctcccagactacggagtgagctggattagacagcctcccggaaagggactggagtggatcggagtgatttggggtagcgaaaccacttactattcatcttccctgaagtcacgggtcaccatttcaaaggataactcaaagaatcaagtgagcctcaagctctcatcagtcaccgccgctgacaccgccgtgtattactgtgccaagcattactactatggagggtcctacgccatggactactggggccagggaactctggtcactgtgtcatctggtggaggaggtagcggaggaggcgggagcggtggaggtggctccgaaatcgtgatgacccagagccctgcaaccctgtccctttctcccggggaacgggctaccctttcttgtcgggcatcacaagatatctcaaaatacctcaattggtatcaacagaagccgggacaggcccctaggcttcttatctaccacacctctcgcctgcatagcgggattcccgcacgctttagcgggtctggaagcgggaccgactacactctgaccatctcatctctccagcccgaggacttcgccgtctacttctgccagcagggtaacaccctgccgtacaccttcggccagggcaccaagcttgagatcaaaaccactactcccgctccaaggccacccacccctgccccgaccatcgcctctcagccgctttccctgcgtccggaggcatgtagacccgcagctggtggggccgtgcatacccggggtcttgacttcgcctgcgatatctacatttgggcccctctggctggtacttgcggggtcctgctgctttcactcgtgatcactctttactgtaagcgcggtcggaagaagctgctgtacatctttaagcaacccttcatgaggcctgtgcagactactcaagaggaggacggctgttcatgccggttcccagaggaggaggaaggcggctgcgaactgcgcgtgaaattcagccgcagcgcagatgctccagcctacaagcaggggcagaaccagctctacaacgaactcaatcttggtcggagagaggagtacgacgtgctggacaagcggagaggacgggacccagaaatgggcgggaagccgcgcagaaagaatccccaagagggcctgtacaacgagctccaaaaggataagatggcagaagcctatagcgagattggtatgaaaggggaacgcagaagaggcaaaggccacgacggactgtaccagggactcagcaccgccaccaaggacacctatgacgctcttcacatgcaggccctgccgcctcgg

SEQ ID NO: 749 - DNA, 1458 bp, Artificial Sequence
  source: /note="Description of Artificial Sequence: Synthetic polynucleotide"
atggctctgcccgtgaccgcactcctcctgccactggctctgctgcttcacgccgctcgcccacaagtccagcttcaagaatcagggcctggtctggtgaagccatctgagactctgtccctcacttgcaccgtgagcggagtgtccctcccagactacggagtgagctggattagacagcctcccggaaagggactggagtggatcggagtgatttggggtagcgaaaccacttactatcaatcttccctgaagtcacgggtcaccatttcaaaggataactcaaagaatcaagtgagcctcaagctctcatcagtcaccgccgctgacaccgccgtgtattactgtgccaagcattactactatggagggtcctacgccatggactactggggccagggaactctggtcactgtgtcatctggtggaggaggtagcggaggaggcgggagcggtggaggtggctccgaaatcgtgatgacccagagccctgcaaccctgtccctttctcccggggaacgggctaccctttcttgtcgggcatcacaagatatctcaaaatacctcaattggtatcaacagaagccgggacaggcccctaggcttcttatctaccacacctctcgcctgcatagcgggattcccgcacgctttagcgggtctggaagcgggaccgactacactctgaccatctcatctctccagcccgaggacttcgccgtctacttctgccagcagggtaacaccctgccgtacaccttcggccagggcaccaagcttgagatcaaaaccactactcccgctccaaggccacccacccctgccccgaccatcgcctctcagccgctttccctgcgtccggaggcatgtagacccgcagctggtggggccgtgcatacccggggtcttgacttcgcctgcgatatctacatttgggcccctctggctggtacttgcggggtcctgctgctttcactcgtgatcactctttactgtaagcgcggtcggaagaagctgctgtacatctttaagcaacccttcatgaggcctgtgcagactactcaagaggaggacggctgttcatgccggttcccagaggaggaggaaggcggctgcgaactgcgcgtgaaattcagccgcagcgcagatgctccagcctacaagcaggggcagaaccagctctacaacgaactcaatcttggtcggagagaggagtacgacgtgctggacaagcggagaggacgggacccagaaatgggcgggaagccgcgcagaaagaatccccaagagggcctgtacaacgagctccaaaaggataagatggcagaagcctatagcgagattggtatgaaaggggaacgcagaagaggcaaaggccacgacggactgtaccagggactcagcaccgccaccaaggacacctatgacgctcttcacatgcaggccctgccgcctcgg

SEQ ID NO: 750 - DNA, 1473 bp, Artificial Sequence
  source: /note="Description of Artificial Sequence: Synthetic polynucleotide"
atggccctccctgtcaccgccctgctgcttccgctggctcttctgctccacgccgctcggcccgaaattgtgatgacccagtcacccgccactcttagcctttcacccggtgagcgcgcaaccctgtcttgcagagcctcccaagacatctcaaaataccttaattggtatcaacagaagcccggacaggctcctcgccttctgatctaccacaccagccggctccattctggaatccctgccaggttcagcggtagcggatctgggaccgactacaccctcactatcagctcactgcagccagaggacttcgctgtctatttctgtcagcaagggaacaccctgccctacacctttggacagggcaccaagctcgagattaaaggtggaggtggcagcggaggaggtgggtccggcggtggaggaagcggcggaggcgggagccaggtccaactccaagaaagcggaccgggtcttgtgaagccatcagaaactctttcactgacttgtactgtgagcggagtgtctctccccgattacggggtgtcttggatcagacagccaccggggaagggtctggaatggattggagtgatttggggctctgagactacttactactcttcatccctcaagtcacgcgtcaccatctcaaaggacaactctaagaatcaggtgtcactgaaactgtcatctgtgaccgcagccgacaccgccgtgtactattgcgctaagcattactattatggcgggagctacgcaatggattactggggacagggtactctggtcaccgtgtccagcaccactaccccagcaccgaggccacccaccccggctcctaccatcgcctcccagcctctgtccctgcgtccggaggcatgtagacccgcagctggtggggccgtgcatacccggggtcttgacttcgcctgcgatatctacatttgggcccctctggctggtacttgcggggtcctgctgctttcactcgtgatcactctttactgtaagcgcggtcggaagaagctgctgtacatctttaagcaacccttcatgaggcctgtgcagactactcaagaggaggacggctgttcatgccggttcccagaggaggaggaaggcggctgcgaactgcgcgtgaaattcagccgcagcgcagatgctccagcctacaagcaggggcagaaccagctctacaacgaactcaatcttggtcggagagaggagtacgacgtgctggacaagcggagaggacgggacccagaaatgggcgggaagccgcgcagaaagaatccccaagagggcctgtacaacgagctccaaaaggataagatggcagaagcctatagcgagattggtatgaaaggggaacgcagaagaggcaaaggccacgacggactgtaccagggactcagcaccgccaccaaggacacctatgacgctcttcacatgcaggccctgccgcctcgg

SEQ ID NO: 751 - DNA, 1473 bp, Artificial Sequence
  source: /note="Description of Artificial Sequence: Synthetic polynucleotide"
atggccctccctgtcaccgccctgctgcttccgctggctcttctgctccacgccgctcggcccgaaattgtgatgacccagtcacccgccactcttagcctttcacccggtgagcgcgcaaccctgtcttgcagagcctcccaagacatctcaaaataccttaattggtatcaacagaagcccggacaggctcctcgccttctgatctaccacaccagccggctccattctggaatccctgccaggttcagcggtagcggatctgggaccgactacaccctcactatcagctcactgcagccagaggacttcgctgtctatttctgtcagcaagggaacaccctgccctacacctttggacagggcaccaagctcgagattaaaggtggaggtggcagcggaggaggtgggtccggcggtggaggaagcggaggcggagggagccaggtccaactccaagaaagcggaccgggtcttgtgaagccatcagaaactctttcactgacttgtactgtgagcggagtgtctctccccgattacggggtgtcttggatcagacagccaccggggaagggtctggaatggattggagtgatttggggctctgagactacttactaccaatcatccctcaagtcacgcgtcaccatctcaaaggacaactctaagaatcaggtgtcactgaaactgtcatctgtgaccgcagccgacaccgccgtgtactattgcgctaagcattactattatggcgggagctacgcaatggattactggggacagggtactctggtcaccgtgtccagcaccactaccccagcaccgaggccacccaccccggctcctaccatcgcctcccagcctctgtccctgcgtccggaggcatgtagacccgcagctggtggggccgtgcatacccggggtcttgacttcgcctgcgatatctacatttgggcccctctggctggtacttgcggggtcctgctgctttcactcgtgatcactctttactgtaagcgcggtcggaagaagctgctgtacatctttaagcaacccttcatgaggcctgtgcagactactcaagaggaggacggctgttcatgccggttcccagaggaggaggaaggcggctgcgaactgcgcgtgaaattcagccgcagcgcagatgctccagcctacaagcaggggcagaaccagctctacaacgaactcaatcttggtcggagagaggagtacgacgtgctggacaagcggagaggacgggacccagaaatgggcgggaagccgcgcagaaagaatccccaagagggcctgtacaacgagctccaaaaggataagatggcagaagcctatagcgagattggtatgaaaggggaacgcagaagaggcaaaggccacgacggactgtaccagggactcagcaccgccaccaaggacacctatgacgctcttcacatgcaggccctgccgcctcgg

SEQ ID NO: 752 - DNA, 1473 bp, Artificial Sequence
  source: /note="Description of Artificial Sequence: Synthetic polynucleotide"
atggctctgcccgtgaccgcactcctcctgccactggctctgctgcttcacgccgctcgcccacaagtccagcttcaagaatcagggcctggtctggtgaagccatctgagactctgtccctcacttgcaccgtgagcggagtgtccctcccagactacggagtgagctggattagacagcctcccggaaagggactggagtggatcggagtgatttggggtagcgaaaccacttactattcatcttccctgaagtcacgggtcaccatttcaaaggataactcaaagaatcaagtgagcctcaagctctcatcagtcaccgccgctgacaccgccgtgtattactgtgccaagcattactactatggagggtcctacgccatggactactggggccagggaactctggtcactgtgtcatctggtggaggaggtagcggaggaggcgggagcggtggaggtggctccggaggtggcggaagcgaaatcgtgatgacccagagccctgcaaccctgtccctttctcccggggaacgggctaccctttcttgtcgggcatcacaagatatctcaaaatacctcaattggtatcaacagaagccgggacaggcccctaggcttcttatctaccacacctctcgcctgcatagcgggattcccgcacgctttagcgggtctggaagcgggaccgactacactctgaccatctcatctctccagcccgaggacttcgccgtctacttctgccagcagggtaacaccctgccgtacaccttcggccagggcaccaagcttgagatcaaaaccactactcccgctccaaggccacccacccctgccccgaccatcgcctctcagccgctttccctgcgtccggaggcatgtagacccgcagctggtggggccgtgcatacccggggtcttgacttcgcctgcgatatctacatttgggcccctctggctggtacttgcggggtcctgctgctttcactcgtgatcactctttactgtaagcgcggtcggaagaagctgctgtacatctttaagcaacccttcatgaggcctgtgcagactactcaagaggaggacggctgttcatgccggttcccagaggaggaggaaggcggctgcgaactgcgcgtgaaattcagccgcagcgcagatgctccagcctacaagcaggggcagaaccagctctacaacgaactcaatcttggtcggagagaggagtacgacgtgctggacaagcggagaggacgggacccagaaatgggcgggaagccgcgcagaaagaatccccaagagggcctgtacaacgagctccaaaaggataagatggcagaagcctatagcgagattggtatgaaaggggaacgcagaagaggcaaaggccacgacggactgtaccagggactcagcaccgccaccaaggacacctatgacgctcttcacatgcaggccctgccgcctcgg

SEQ ID NO: 753 - DNA, 1473 bp, Artificial Sequence
  source: /note="Description of Artificial Sequence: Synthetic polynucleotide"
atggctctgcccgtgaccgcactcctcctgccactggctctgctgcttcacgccgctcgcccacaagtccagcttcaagaatcagggcctggtctggtgaagccatctgagactctgtccctcacttgcaccgtgagcggagtgtccctcccagactacggagtgagctggattagacagcctcccggaaagggactggagtggatcggagtgatttggggtagcgaaaccacttactatcaatcttccctgaagtcacgggtcaccatttcaaaggataactcaaagaatcaagtgagcctcaagctctcatcagtcaccgccgctgacaccgccgtgtattactgtgccaagcattactactatggagggtcctacgccatggactactggggccagggaactctggtcactgtgtcatctggtggaggaggtagcggaggaggcgggagcggtggaggtggctccggaggcggtgggtcagaaatcgtgatgacccagagccctgcaaccctgtccctttctcccggggaacgggctaccctttcttgtcgggcatcacaagatatctcaaaatacctcaattggtatcaacagaagccgggacaggcccctaggcttcttatctaccacacctctcgcctgcatagcgggattcccgcacgctttagcgggtctggaagcgggaccgactacactctgaccatctcatctctccagcccgaggacttcgccgtctacttctgccagcagggtaacaccctgccgtacaccttcggccagggcaccaagcttgagatcaaaaccactactcccgctccaaggccacccacccctgccccgaccatcgcctctcagccgctttccctgcgtccggaggcatgtagacccgcagctggtggggccgtgcatacccggggtcttgacttcgcctgcgatatctacatttgggcccctctggctggtacttgcggggtcctgctgctttcactcgtgatcactctttactgtaagcgcggtcggaagaagctgctgtacatctttaagcaacccttcatgaggcctgtgcagactactcaagaggaggacggctgttcatgccggttcccagaggaggaggaaggcggctgcgaactgcgcgtgaaattcagccgcagcgcagatgctccagcctacaagcaggggcagaaccagctctacaacgaactcaatcttggtcggagagaggagtacgacgtgctggacaagcggagaggacgggacccagaaatgggcgggaagccgcgcagaaagaatccccaagagggcctgtacaacgagctccaaaaggataagatggcagaagcctatagcgagattggtatgaaaggggaacgcagaagaggcaaaggccacgacggactgtaccagggactcagcaccgccaccaaggacacctatgacgctcttcacatgcaggccctgccgcctcgg

SEQ ID NO: 754 - DNA, 1473 bp, Artificial Sequence
  source: /note="Description of Artificial Sequence: Synthetic polynucleotide"
atggccctccctgtcaccgccctgctgcttccgctggctcttctgctccacgccgctcggcccgaaattgtgatgacccagtcacccgccactcttagcctttcacccggtgagcgcgcaaccctgtcttgcagagcctcccaagacatctcaaaataccttaattggtatcaacagaagcccggacaggctcctcgccttctgatctaccacaccagccggctccattctggaatccctgccaggttcagcggtagcggatctgggaccgactacaccctcactatcagctcactgcagccagaggacttcgctgtctatttctgtcagcaagggaacaccctgccctacacctttggacagggcaccaagctcgagattaaaggtggaggtggcagcggaggaggtgggtccggcggtggaggaagcggaggcggtgggagccaggtccaactccaagaaagcggaccgggtcttgtgaagccatcagaaactctttcactgacttgtactgtgagcggagtgtctctccccgattacggggtgtcttggatcagacagccaccggggaagggtctggaatggattggagtgatttggggctctgagactacttactacaactcatccctcaagtcacgcgtcaccatctcaaaggacaactctaagaatcaggtgtcactgaaactgtcatctgtgaccgcagccgacaccgccgtgtactattgcgctaagcattactattatggcgggagctacgcaatggattactggggacagggtactctggtcaccgtgtccagcaccactaccccagcaccgaggccacccaccccggctcctaccatcgcctcccagcctctgtccctgcgtccggaggcatgtagacccgcagctggtggggccgtgcatacccggggtcttgacttcgcctgcgatatctacatttgggcccctctggctggtacttgcggggtcctgctgctttcactcgtgatcactctttactgtaagcgcggtcggaagaagctgctgtacatctttaagcaacccttcatgaggcctgtgcagactactcaagaggaggacggctgttcatgccggttcccagaggaggaggaaggcggctgcgaactgcgcgtgaaattcagccgcagcgcagatgctccagcctacaagcaggggcagaaccagctctacaacgaactcaatcttggtcggagagaggagtacgacgtgctggacaagcggagaggacgggacccagaaatgggcgggaagccgcgcagaaagaatccccaagagggcctgtacaacgagctccaaaaggataagatggcagaagcctatagcgagattggtatgaaaggggaacgcagaagaggcaaaggccacgacggactgtaccagggactcagcaccgccaccaaggacacctatgacgctcttcacatgcaggccctgccgcctcgg

SEQ ID NO: 755 - DNA, 1473 bp, Artificial Sequence; identical to SEQ ID NO: 754
  source: /note="Description of Artificial Sequence: Synthetic polynucleotide"

SEQ ID NO: 756 - DNA, 1473 bp, Artificial Sequence
  source: /note="Description of Artificial Sequence: Synthetic polynucleotide"
atggctctgcccgtgaccgcactcctcctgccactggctctgctgcttcacgccgctcgcccacaagtccagcttcaagaatcagggcctggtctggtgaagccatctgagactctgtccctcacttgcaccgtgagcggagtgtccctcccagactacggagtgagctggattagacagcctcccggaaagggactggagtggatcggagtgatttggggtagcgaaaccacttactataactcttccctgaagtcacgggtcaccatttcaaaggataactcaaagaatcaagtgagcctcaagctctcatcagtcaccgccgctgacaccgccgtgtattactgtgccaagcattactactatggagggtcctacgccatggactactggggccagggaactctggtcactgtgtcatctggtggaggaggtagcggaggaggcgggagcggtggaggtggctccggaggtggcggaagcgaaatcgtgatgacccagagccctgcaaccctgtccctttctcccggggaacgggctaccctttcttgtcgggcatcacaagatatctcaaaatacctcaattggtatcaacagaagccgggacaggcccctaggcttcttatctaccacacctctcgcctgcatagcgggattcccgcacgctttagcgggtctggaagcgggaccgactacactctgaccatctcatctctccagcccgaggacttcgccgtctacttctgccagcagggtaacaccctgccgtacaccttcggccagggcaccaagcttgagatcaaaaccactactcccgctccaaggccacccacccctgccccgaccatcgcctctcagccgctttccctgcgtccggaggcatgtagacccgcagctggtggggccgtgcatacccggggtcttgacttcgcctgcgatatctacatttgggcccctctggctggtacttgcggggtcctgctgctttcactcgtgatcactctttactgtaagcgcggtcggaagaagctgctgtacatctttaagcaacccttcatgaggcctgtgcagactactcaagaggaggacggctgttcatgccggttcccagaggaggaggaaggcggctgcgaactgcgcgtgaaattcagccgcagcgcagatgctccagcctacaagcaggggcagaaccagctctacaacgaactcaatcttggtcggagagaggagtacgacgtgctggacaagcggagaggacgggacccagaaatgggcgggaagccgcgcagaaagaatccccaagagggcctgtacaacgagctccaaaaggataagatggcagaagcctatagcgagattggtatgaaaggggaacgcagaagaggcaaaggccacgacggactgtaccagggactcagcaccgccaccaaggacacctatgacgctcttcacatgcaggccctgccgcctcgg

SEQ ID NO: 757 - DNA, 1458 bp, Artificial Sequence
  source: /note="Description of Artificial Sequence: Synthetic polynucleotide"
atggccctccctgtcaccgccctgctgcttccgctggctcttctgctccacgccgctcggcccgaaattgtgatgacccagtcacccgccactcttagcctttcacccggtgagcgcgcaaccctgtcttgcagagcctcccaagacatctcaaaataccttaattggtatcaacagaagcccggacaggctcctcgccttctgatctaccacaccagccggctccattctggaatccctgccaggttcagcggtagcggatctgggaccgactacaccctcactatcagctcactgcagccagaggacttcgctgtctatttctgtcagcaagggaacaccctgccctacacctttggacagggcaccaagctcgagattaaaggtggaggtggcagcggaggaggtgggtccggcggtggaggaagccaggtccaactccaagaaagcggaccgggtcttgtgaagccatcagaaactctttcactgacttgtactgtgagcggagtgtctctccccgattacggggtgtcttggatcagacagccaccggggaagggtctggaatggattggagtgatttggggctctgagactacttactacaactcatccctcaagtcacgcgtcaccatctcaaaggacaactctaagaatcaggtgtcactgaaactgtcatctgtgaccgcagccgacaccgccgtgtactattgcgctaagcattactattatggcgggagctacgcaatggattactggggacagggtactctggtcaccgtgtccagcaccactaccccagcaccgaggccacccaccccggctcctaccatcgcctcccagcctctgtccctgcgtccggaggcatgtagacccgcagctggtggggccgtgcatacccggggtcttgacttcgcctgcgatatctacatttgggcccctctggctggtacttgcggggtcctgctgctttcactcgtgatcactctttactgtaagcgcggtcggaagaagctgctgtacatctttaagcaacccttcatgaggcctgtgcagactactcaagaggaggacggctgttcatgccggttcccagaggaggaggaaggcggctgcgaactgcgcgtgaaattcagccgcagcgcagatgctccagcctacaagcaggggcagaaccagctctacaacgaactcaatcttggtcggagagaggagtacgacgtgctggacaagcggagaggacgggacccagaaatgggcgggaagccgcgcagaaagaatccccaagagggcctgtacaacgagctccaaaaggataagatggcagaagcctatagcgagattggtatgaaaggggaacgcagaagaggcaaaggccacgacggactgtaccagggactcagcaccgccaccaaggacacctatgacgctcttcacatgcaggccctgccgcctcgg

SEQ ID NO: 758 - protein, 486 aa, Artificial Sequence
  source: /note="Description of Artificial Sequence: Synthetic polypeptide"
MALPVTALLLPLALLLHAARPEIVMTQSPATLSLSPGERATLSCRASQDISKYLNWYQQKPGQAPRLLIYHTSRLHSGIPARFSGSGSGTDYTLTISSLQPEDFAVYFCQQGNTLPYTFGQGTKLEIKGGGGSGGGGSGGGGSQVQLQESGPGLVKPSETLSLTCTVSGVSLPDYGVSWIRQPPGKGLEWIGVIWGSETTYYSSSLKSRVTISKDNSKNQVSLKLSSVTAADTAVYYCAKHYYYGGSYAMDYWGQGTLVTVSSTTTPAPRPPTPAPTIASQPLSLRPEACRPAAGGAVHTRGLDFACDIYIWAPLAGTCGVLLLSLVITLYCKRGRKKLLYIFKQPFMRPVQTTQEEDGCSCRFPEEEEGGCELRVKFSRSADAPAYKQGQNQLYNELNLGRREEYDVLDKRRGRDPEMGGKPRRKNPQEGLYNELQKDKMAEAYSEIGMKGERRRGKGHDGLYQGLSTATKDTYDALHMQALPPR

SEQ ID NO: 759 - protein, 486 aa, Artificial Sequence
  source: /note="Description of Artificial Sequence: Synthetic polypeptide"
MALPVTALLLPLALLLHAARPEIVMTQSPATLSLSPGERATLSCRASQDISKYLNWYQQKPGQAPRLLIYHTSRLHSGIPARFSGSGSGTDYTLTISSLQPEDFAVYFCQQGNTLPYTFGQGTKLEIKGGGGSGGGGSGGGGSQVQLQESGPGLVKPSETLSLTCTVSGVSLPDYGVSWIRQPPGKGLEWIGVIWGSETTYYQSSLKSRVTISKDNSKNQVSLKLSSVTAADTAVYYCAKHYYYGGSYAMDYWGQGTLVTVSSTTTPAPRPPTPAPTIASQPLSLRPEACRPAAGGAVHTRGLDFACDIYIWAPLAGTCGVLLLSLVITLYCKRGRKKLLYIFKQPFMRPVQTTQEEDGCSCRFPEEEEGGCELRVKFSRSADAPAYKQGQNQLYNELNLGRREEYDVLDKRRGRDPEMGGKPRRKNPQEGLYNELQKDKMAEAYSEIGMKGERRRGKGHDGLYQGLSTATKDTYDALHMQALPPR

SEQ ID NO: 760 - protein, 486 aa, Artificial Sequence
  source: /note="Description of Artificial Sequence: Synthetic polypeptide"
MALPVTALLLPLALLLHAARPQVQLQESGPGLVKPSETLSLTCTVSGVSLPDYGVSWIRQPPGKGLEWIGVIWGSETTYYSSSLKSRVTISKDNSKNQVSLKLSSVTAADTAVYYCAKHYYYGGSYAMDYWGQGTLVTVSSGGGGSGGGGSGGGGSEIVMTQSPATLSLSPGERATLSCRASQDISKYLNWYQQKPGQAPRLLIYHTSRLHSGIPARFSGSGSGTDYTLTISSLQPEDFAVYFCQQGNTLPYTFGQGTKLEIKTTTPAPRPPTPAPTIASQPLSLRPEACRPAAGGAVHTRGLDFACDIYIWAPLAGTCGVLLLSLVITLYCKRGRKKLLYIFKQPFMRPVQTTQEEDGCSCRFPEEEEGGCELRVKFSRSADAPAYKQGQNQLYNELNLGRREEYDVLDKRRGRDPEMGGKPRRKNPQEGLYNELQKDKMAEAYSEIGMKGERRRGKGHDGLYQGLSTATKDTYDALHMQALPPR

SEQ ID NO: 761 - protein, 486 aa, Artificial Sequence
  source: /note="Description of Artificial Sequence: Synthetic polypeptide"
MALPVTALLLPLALLLHAARPQVQLQESGPGLVKPSETLSLTCTVSGVSLPDYGVSWIRQPPGKGLEWIGVIWGSETTYYQSSLKSRVTISKDNSKNQVSLKLSSVTAADTAVYYCAKHYYYGGSYAMDYWGQGTLVTVSSGGGGSGGGGSGGGGSEIVMTQSPATLSLSPGERATLSCRASQDISKYLNWYQQKPGQAPRLLIYHTSRLHSGIPARFSGSGSGTDYTLTISSLQPEDFAVYFCQQGNTLPYTFGQGTKLEIKTTTPAPRPPTPAPTIASQPLSLRPEACRPAAGGAVHTRGLDFACDIYIWAPLAGTCGVLLLSLVITLYCKRGRKKLLYIFKQPFMRPVQTTQEEDGCSCRFPEEEEGGCELRVKFSRSADAPAYKQGQNQLYNELNLGRREEYDVLDKRRGRDPEMGGKPRRKNPQEGLYNELQKDKMAEAYSEIGMKGERRRGKGHDGLYQGLSTATKDTYDALHMQALPPR

SEQ ID NO: 762 - protein, 491 aa, Artificial Sequence
  source: /note="Description of Artificial Sequence: Synthetic polypeptide"
MALPVTALLLPLALLLHAARPEIVMTQSPATLSLSPGERATLSCRASQDISKYLNWYQQKPGQAPRLLIYHTSRLHSGIPARFSGSGSGTDYTLTISSLQPEDFAVYFCQQGNTLPYTFGQGTKLEIKGGGGSGGGGSGGGGSGGGGSQVQLQESGPGLVKPSETLSLTCTVSGVSLPDYGVSWIRQPPGKGLEWIGVIWGSETTYYSSSLKSRVTISKDNSKNQVSLKLSSVTAADTAVYYCAKHYYYGGSYAMDYWGQGTLVTVSSTTTPAPRPPTPAPTIASQPLSLRPEACRPAAGGAVHTRGLDFACDIYIWAPLAGTCGVLLLSLVITLYCKRGRKKLLYIFKQPFMRPVQTTQEEDGCSCRFPEEEEGGCELRVKFSRSADAPAYKQGQNQLYNELNLGRREEYDVLDKRRGRDPEMGGKPRRKNPQEGLYNELQKDKMAEAYSEIGMKGERRRGKGHDGLYQGLSTATKDTYDALHMQALPPR

SEQ ID NO: 763 - protein, 491 aa, Artificial Sequence
  source: /note="Description of Artificial Sequence: Synthetic polypeptide"
MALPVTALLLPLALLLHAARPEIVMTQSPATLSLSPGERATLSCRASQDISKYLNWYQQKPGQAPRLLIYHTSRLHSGIPARFSGSGSGTDYTLTISSLQPEDFAVYFCQQGNTLPYTFGQGTKLEIKGGGGSGGGGSGGGGSGGGGSQVQLQESGPGLVKPSETLSLTCTVSGVSLPDYGVSWIRQPPGKGLEWIGVIWGSETTYYQSSLKSRVTISKDNSKNQVSLKLSSVTAADTAVYYCAKHYYYGGSYAMDYWGQGTLVTVSSTTTPAPRPPTPAPTIASQPLSLRPEACRPAAGGAVHTRGLDFACDIYIWAPLAGTCGVLLLSLVITLYCKRGRKKLLYIFKQPFMRPVQTTQEEDGCSCRFPEEEEGGCELRVKFSRSADAPAYKQGQNQLYNELNLGRREEYDVLDKRRGRDPEMGGKPRRKNPQEGLYNELQKDKMAEAYSEIGMKGERRRGKGHDGLYQGLSTATKDTYDALHMQALPPR

SEQ ID NO: 764 - protein, 491 aa, Artificial Sequence
  source: /note="Description of Artificial Sequence: Synthetic polypeptide"
MALPVTALLLPLALLLHAARPQVQLQESGPGLVKPSETLSLTCTVSGVSLPDYGVSWIRQPPGKGLEWIGVIWGSETTYYSSSLKSRVTISKDNSKNQVSLKLSSVTAADTAVYYCAKHYYYGGSYAMDYWGQGTLVTVSSGGGGSGGGGSGGGGSGGGGSEIVMTQSPATLSLSPGERATLSCRASQDISKYLNWYQQKPGQAPRLLIYHTSRLHSGIPARFSGSGSGTDYTLTISSLQPEDFAVYFCQQGNTLPYTFGQGTKLEIKTTTPAPRPPTPAPTIASQPLSLRPEACRPAAGGAVHTRGLDFACDIYIWAPLAGTCGVLLLSLVITLYCKRGRKKLLYIFKQPFMRPVQTTQEEDGCSCRFPEEEEGGCELRVKFSRSADAPAYKQGQNQLYNELNLGRREEYDVLDKRRGRDPEMGGKPRRKNPQEGLYNELQKDKMAEAYSEIGMKGERRRGKGHDGLYQGLSTATKDTYDALHMQALPPR

SEQ ID NO: 765 - protein, 491 aa, Artificial Sequence
  source: /note="Description of Artificial Sequence: Synthetic polypeptide"
MALPVTALLLPLALLLHAARPQVQLQESGPGLVKPSETLSLTCTVSGVSLPDYGVSWIRQPPGKGLEWIGVIWGSETTYYQSSLKSRVTISKDNSKNQVSLKLSSVTAADTAVYYCAKHYYYGGSYAMDYWGQGTLVTVSSGGGGSGGGGSGGGGSGGGGSEIVMTQSPATLSLSPGERATLSCRASQDISKYLNWYQQKPGQAPRLLIYHTSRLHSGIPARFSGSGSGTDYTLTISSLQPEDFAVYFCQQGNTLPYTFGQGTKLEIKTTTPAPRPPTPAPTIASQPLSLRPEACRPAAGGAVHTRGLDFACDIYIWAPLAGTCGVLLLSLVITLYCKRGRKKLLYIFKQPFMRPVQTTQEEDGCSCRFPEEEEGGCELRVKFSRSADAPAYKQGQNQLYNELNLGRREEYDVLDKRRGRDPEMGGKPRRKNPQEGLYNELQKDKMAEAYSEIGMKGERRRGKGHDGLYQGLSTATKDTYDALHMQALPPR

SEQ ID NO: 766 - protein, 491 aa, Artificial Sequence
  source: /note="Description of Artificial Sequence: Synthetic polypeptide"
MALPVTALLLPLALLLHAARPEIVMTQSPATLSLSPGERATLSCRASQDISKYLNWYQQKPGQAPRLLIYHTSRLHSGIPARFSGSGSGTDYTLTISSLQPEDFAVYFCQQGNTLPYTFGQGTKLEIKGGGGSGGGGSGGGGSGGGGSQVQLQESGPGLVKPSETLSLTCTVSGVSLPDYGVSWIRQPPGKGLEWIGVIWGSETTYYNSSLKSRVTISKDNSKNQVSLKLSSVTAADTAVYYCAKHYYYGGSYAMDYWGQGTLVTVSSTTTPAPRPPTPAPTIASQPLSLRPEACRPAAGGAVHTRGLDFACDIYIWAPLAGTCGVLLLSLVITLYCKRGRKKLLYIFKQPFMRPVQTTQEEDGCSCRFPEEEEGGCELRVKFSRSADAPAYKQGQNQLYNELNLGRREEYDVLDKRRGRDPEMGGKPRRKNPQEGLYNELQKDKMAEAYSEIGMKGERRRGKGHDGLYQGLSTATKDTYDALHMQALPPR

SEQ ID NO: 767 - protein, 491 aa, Artificial Sequence; identical to SEQ ID NO: 766
  source: /note="Description of Artificial Sequence: Synthetic polypeptide"

SEQ ID NO: 768 - protein, 491 aa, Artificial Sequence
  source: /note="Description of Artificial Sequence: Synthetic polypeptide"
MALPVTALLLPLALLLHAARPQVQLQESGPGLVKPSETLSLTCTVSGVSLPDYGVSWIRQPPGKGLEWIGVIWGSETTYYNSSLKSRVTISKDNSKNQVSLKLSSVTAADTAVYYCAKHYYYGGSYAMDYWGQGTLVTVSSGGGGSGGGGSGGGGSGGGGSEIVMTQSPATLSLSPGERATLSCRASQDISKYLNWYQQKPGQAPRLLIYHTSRLHSGIPARFSGSGSGTDYTLTISSLQPEDFAVYFCQQGNTLPYTFGQGTKLEIKTTTPAPRPPTPAPTIASQPLSLRPEACRPAAGGAVHTRGLDFACDIYIWAPLAGTCGVLLLSLVITLYCKRGRKKLLYIFKQPFMRPVQTTQEEDGCSCRFPEEEEGGCELRVKFSRSADAPAYKQGQNQLYNELNLGRREEYDVLDKRRGRDPEMGGKPRRKNPQEGLYNELQKDKMAEAYSEIGMKGERRRGKGHDGLYQGLSTATKDTYDALHMQALPPR

SEQ ID NO: 769 - protein, 486 aa, Artificial Sequence
  source: /note="Description of Artificial Sequence: Synthetic polypeptide"
MALPVTALLLPLALLLHAARPEIVMTQSPATLSLSPGERATLSCRASQDISKYLNWYQQKPGQAPRLLIYHTSRLHSGIPARFSGSGSGTDYTLTISSLQPEDFAVYFCQQGNTLPYTFGQGTKLEIKGGGGSGGGGSGGGGSQVQLQESGPGLVKPSETLSLTCTVSGVSLPDYGVSWIRQPPGKGLEWIGVIWGSETTYYNSSLKSRVTISKDNSKNQVSLKLSSVTAADTAVYYCAKHYYYGGSYAMDYWGQGTLVTVSSTTTPAPRPPTPAPTIASQPLSLRPEACRPAAGGAVHTRGLDFACDIYIWAPLAGTCGVLLLSLVITLYCKRGRKKLLYIFKQPFMRPVQTTQEEDGCSCRFPEEEEGGCELRVKFSRSADAPAYKQGQNQLYNELNLGRREEYDVLDKRRGRDPEMGGKPRRKNPQEGLYNELQKDKMAEAYSEIGMKGERRRGKGHDGLYQGLSTATKDTYDALHMQALPPR

SEQ ID NO: 770 - DNA, 813 bp, Artificial Sequence
  source: /note="Description of Artificial Sequence: Synthetic polynucleotide"
atggccctgcccgtcaccgctctgctgctgccccttgctctgcttcttcatgcagcaaggccggacatccagatgacccaaaccacctcatccctctctgcctctcttggagacagggtgaccatttcttgtcgcgccagccaggacatcagcaagtatctgaactggtatcagcagaagccggacggaaccgtgaagctcctgatctaccatacctctcgcctgcatagcggcgtgccctcacgcttctctggaagcggatcaggaaccgattattctctcactatttcaaatcttgagcaggaagatattgccacctatttctgccagcagggtaataccctgccctacaccttcggaggagggaccaagctcgaaatcaccggtggaggaggcagcggcggtggagggtctggtggaggtggttctgaggtgaagctgcaagaatcaggccctggacttgtggccccttcacagtccctgagcgtgacttgcaccgtgtccggagtctccctgcccgactacggagtgtcatggatcagacaacctccacggaaaggactggaatggctcggtgtcatctggggtagcgaaactacttactacaattcagccctcaaaagcaggctgactattatcaaggacaacagcaagtcccaagtctttcttaagatgaactcactccagactgacgacaccgcaatctactattgtgctaagcactactactacggaggatcctacgctatggattactggggacaaggtacttccgtcactgtctcttcacaccatcatcaccatcaccatcac

SEQ ID NO: 771 - protein, 271 aa, Artificial Sequence
  source: /note="Description of Artificial Sequence: Synthetic polypeptide"
MALPVTALLLPLALLLHAARPDIQMTQTTSSLSASLGDRVTISCRASQDISKYLNWYQQKPDGTVKLLIYHTSRLHSGVPSRFSGSGSGTDYSLTISNLEQEDIATYFCQQGNTLPYTFGGGTKLEITGGGGSGGGGSGGGGSEVKLQESGPGLVAPSQSLSVTCTVSGVSLPDYGVSWIRQPPRKGLEWLGVIWGSETTYYNSALKSRLTIIKDNSKSQVFLKMNSLQTDDTAIYYCAKHYYYGGSYAMDYWGQGTSVTVSSHHHHHHHH

SEQ ID NO: 772 - DNA, 1458 bp, Artificial Sequence
  source: /note="Description of Artificial Sequence: Synthetic polynucleotide"
atggccttaccagtgaccgccttgctcctgccgctggccttgctgctccacgccgccaggccggacatccagatgacacagactacatcctccctgtctgcctctctgggagacagagtcaccatcagttgcagggcaagtcaggacattagtaaatatttaaattggtatcagcagaaaccagatggaactgttaaactcctgatctaccatacatcaagattacactcaggagtcccatcaaggttcagtggcagtgggtctggaacagattattctctcaccattagcaacctggagcaagaagatattgccacttacttttgccaacagggtaatacgcttccgtacacgttcggaggggggaccaagctggagatcacaggtggcggtggctcgggcggtggtgggtcgggtggcggcggatctgaggtgaaactgcaggagtcaggacctggcctggtggcgccctcacagagcctgtccgtcacatgcactgtctcaggggtctcattacccgactatggtgtaagctggattcgccagcctccacgaaagggtctggagtggctgggagtaatatggggtagtgaaaccacatactataattcagctctcaaatccagactgaccatcatcaaggacaactccaagagccaagttttcttaaaaatgaacagtctgcaaactgatgacacagccatttactactgtgccaaacattattactacggtggtagctatgctatggactactggggccaaggaacctcagtcaccgtctcctcaaccacgacgccagcgccgcgaccaccaacaccggcgcccaccatcgcgtcgcagcccctgtccctgcgcccagaggcgtgccggccagcggcggggggcgcagtgcacacgagggggctggacttcgcctgtgatatctacatctgggcgcccttggccgggacttgtggggtccttctcctgtcactggttatcaccctttactgcaaacggggcagaaagaaactcctgtatatattcaaacaaccatttatgagaccagtacaaactactcaagaggaagatggctgtagctgccgatttccagaagaagaagaaggaggatgtgaactgagagtgaagttcagcaggagcgcagacgcccccgcgtacaagcagggccagaaccagctctataacgagctcaatctaggacgaagagaggagtacgatgttttggacaagagacgtggccgggaccctgagatggggggaaagccgagaaggaagaaccctcaggaaggcctgtacaatgaactgcagaaagataagatggcggaggcctacagtgagattgggatgaaaggcgagcgccggaggggcaaggggcacgatggcctttaccagggtctcagtacagccaccaaggacacctacgacgcccttcacatgcaggccctgccccctcgc

SEQ ID NO: 773 - protein, 486 aa, Artificial Sequence
  source: /note="Description of Artificial Sequence: Synthetic polypeptide"
MALPVTALLLPLALLLHAARPDIQMTQTTSSLSASLGDRVTISCRASQDISKYLNWYQQKPDGTVKLLIYHTSRLHSGVPSRFSGSGSGTDYSLTISNLEQEDIATYFCQQGNTLPYTFGGGTKLEITGGGGSGGGGSGGGGSEVKLQESGPGLVAPSQSLSVTCTVSGVSLPDYGVSWIRQPPRKGLEWLGVIWGSETTYYNSALKSRLTIIKDNSKSQVFLKMNSLQTDDTAIYYCAKHYYYGGSYAMDYWGQGTSVTVSSTTTPAPRPPTPAPTIASQPLSLRPEACRPAAGGAVHTRGLDFACDIYIWAPLAGTCGVLLLSLVITLYCKRGRKKLLYIFKQPFMRPVQTTQEEDGCSCRFPEEEEGGCELRVKFSRSADAPAYKQGQNQLYNELNLGRREEYDVLDKRRGRDPEMGGKPRRKNPQEGLYNELQKDKMAEAYSEIGMKGERRRGKGHDGLYQGLSTATKDTYDALHMQALPPR

SEQ ID NO: 774 - protein, 242 aa, Artificial Sequence
  source: /note="Description of Artificial Sequence: Synthetic polypeptide"
DIQMTQTTSSLSASLGDRVTISCRASQDISKYLNWYQQKPDGTVKLLIYHTSRLHSGVPSRFSGSGSGTDYSLTISNLEQEDIATYFCQQGNTLPYTFGGGTKLEITGGGGSGGGGSGGGGSEVKLQESGPGLVAPSQSLSVTCTVSGVSLPDYGVSWIRQPPRKGLEWLGVIWGSETTYYNSALKSRLTIIKDNSKSQVFLKMNSLQTDDTAIYYCAKHYYYGGSYAMDYWGQGTSVTVSS

SEQ ID NO: 775 - protein, 244 aa, Artificial Sequence
  source: /note="Description of Artificial Sequence: Synthetic polypeptide"
QVQLLESGAELVRPGSSVKISCKASGYAFSSYWMNWVKQRPGQGLEWIGQIYPGDGDTNYNGKFKGQATLTADKSSSTAYMQLSGLTSEDSAVYSCARKTISSVVDFYFDYWGQGTTVTGGGSGGGSGGGSGGGSELVLTQSPKFMSTSVGDRVSVTCKASQNVGTNVAWYQQKPGQSPKPLIYSATYRNSGVPDRFTGSGSGTDFTLTITNVQSKDLADYFCQYNRYPYTSFFFTKLEIKRRS

SEQ ID NO: 776 - protein, 464 aa, Artificial Sequence
  source: /note="Description of Artificial Sequence: Synthetic polypeptide"
QVQLLESGAELVRPGSSVKISCKASGYAFSSYWMNWVKQRPGQGLEWIGQIYPGDGDTNYNGKFKGQATLTADKSSSTAYMQLSGLTSEDSAVYSCARKTISSVVDFYFDYWGQGTTVTGGGSGGGSGGGSGGGSELVLTQSPKFMSTSVGDRVSVTCKASQNVGTNVAWYQQKPGQSPKPLIYSATYRNSGVPDRFTGSGSGTDFTLTITNVQSKDLADYFCQYNRYPYTSFFFTKLEIKRRSKIEVMYPPPYLDNEKSNGTIIHVKGKHLCPSPLFPGPSKPFWVLVVVGGVLACYSLLVTVAFIIFWVRSKRSRLLHSDYMNMTPRRPGPTRKHYQPYAPPRDFAAYRSRVKFSRSADAPAYQQGQNQLYNELNLGRREEYDVLDKRRGRDPEMGGKPRRKNPQEGLYNELQKDKMAEAYSEIGMKGERRRGKGHDGLYQGLSTATKDTYDALHMQALPPR

SEQ ID NO: 777 - protein, 246 aa, Artificial Sequence
  source: /note="Description of Artificial Sequence: Synthetic polypeptide"
DIQMTQTTSSLSASLGDRVTISCRASQDISKYLNWYQQKPDGTVKLLIYHTSRLHSGVPSRFSGSGSGTDYSLTISNLEQEDIATYFCQQGNTLPYTFGGGTKLEITGSTSGSGKPGSGEGSTKGEVKLQESGPGLVAPSQSLSVTCTVSGVSLPDYGVSWIRQPPRKGLEWLGVIWGSETTYYNSALKSRLTIIKDNSKSQVFLKMNSLQTDDTAIYYCAKHYYYGGSYAMDYWGQGTSVTVSSE

SEQ ID NO: 778 - protein, 439 aa, Artificial Sequence
  source: /note="Description of Artificial Sequence: Synthetic polypeptide"
DIQMTQTTSSLSASLGDRVTISCRASQDISKYLNWYQQKPDGTVKLLIYHTSRLHSGVPSRFSGSGSGTDYSLTISNLEQEDIATYFCQQGNTLPYTFGGGTKLEITGSTSGSGKPGSGEGSTKGEVKLQESGPGLVAPSQSLSVTCTVSGVSLPDYGVSWIRQPPRKGLEWLGVIWGSETTYYNSALKSRLTIIKDNSKSQVFLKMNSLQTDDTAIYYCAKHYYYGGSYAMDYWGQGTSVTVSSESKYGPPCPPCPMFWVLVVVGGVLACYSLLVTVAFIIFWVKRGRKKLLYIFKQPFMRPVQTTQEEDGCSCRFEEEEGGCELRVKFSRSADAPAYQQGQNQLYNELNLGRREEYDVLDKRRGRDPEMGGKPRRKNPQEGLYNELQKDKMAEAYSEIGMKGERRRGKGHDGLYQGLSTATKDTYDALHMQALPPRL

SEQ ID NO: 779 - protein, 819 aa, Artificial Sequence
  source: /note="Description of Artificial Sequence: Synthetic polypeptide"
DIQMTQTTSSLSASLGDRVTISCRASQDISKYLNWYQQKPDGTVKLLIYHTSRLHSGVPSRFSGSGSGTDYSLTISNLEQEDIATYFCQQGNTLPYTFGGGTKLEITGSTSGSGKPGSGEGSTKGEVKLQESGPGLVAPSQSLSVTCTVSGVSLPDYGVSWIRQPPRKGLEWLGVIWGSETTYYNSALKSRLTIIKDNSKSQVFLKMNSLQTDDTAIYYCAKHYYYGGSYAMDYWGQGTSVTVSSESKYGPPCPPCPMFWVLVVVGGVLACYSLLVTVAFIIFWVKRGRKKLLYIFKQPFMRPVQTTQEEDGCSCRFEEEEGGCELRVKFSRSADAPAYQQGQNQLYNELNLGRREEYDVLDKRRGRDPEMGGKPRRKNPQEGLYNELQKDKMAEAYSEIGMKGERRRGKGHDGLYQGLSTATKDTYDALHMQALPPRLEGGGEGRGSLLTCGDVEENPGPRMLLLVTSLLLCELPHPAFLLIPRKVCNGIGIGEFKDSLSINATNIKHFKNCTSISGDLHILPVAFRGDSFTHTPPLDPQELDILKTVKEITGFLLIQAWPENRTDLHAFENLEIIRGRTKQHGQFSLAVVSLNITSLGLRSLKEISDGDVIISGNKNLCYANTINWKKLFGTSGQKTKIISNRGENSCKATGQVCHALCSPEGCWGPEPRDCVSCRNVSRGRECVDKCNLLEGEPREFVENSECIQCHPECLPQAMNITCTGRGPDNCIQCAHYIDGPHCVKTCPAGVMGENNTLVWKYADAGHVCHLCHPNCTYGCTGPGLEGCPTNGPKIPSIATGMVGALLLLLVVALGIGLFM

SEQ ID NO: 780 - protein, 245 aa, Artificial Sequence
  source: /note="Description of Artificial Sequence: Synthetic polypeptide"
DIQMTQTTSSLSASLGDRVTISCRASQDISKYLNWYQQKPDGTVKLLIYHTSRLHSGVPSRFSGSGSGTDYSLTISNLEQEDIATYFCQQGNTLPYTFGGGTKLEITGSTSGSGKPGSGEGSTKGEVKLQESGPGLVAPSQSLSVTCTVSGVSLPDYGVSWIRQPPRKGLEWLGVIWGSETTYYNSALKSRLTIIKDNSKSQVFLKMNSLQTDDTAIYYCAKHYYYGGSYAMDYWGQGTSVTVSS

SEQ ID NO: 781 - protein, 467 aa, Artificial Sequence
  source: /note="Description of Artificial Sequence: Synthetic polypeptide"
DIQMTQTTSSLSASLGDRVTISCRASQDISKYLNWYQQKPDGTVKLLIYHTSRLHSGVPSRFSGSGSGTDYSLTISNLEQEDIATYFCQQGNTLPYTFGGGTKLEITGSTSGSGKPGSGEGSTKGEVKLQESGPGLVAPSQSLSVTCTVSGVSLPDYGVSWIRQPPRKGLEWLGVIWGSETTYYNSALKSRLTIIKDNSKSQVFLKMNSLQTDDTAIYYCAKHYYYGGSYAMDYWGQGTSVTVSSAAAIEVMYPPPYLDNEKSNGTIIHVKGKHLCPSPLFPGPSKPFWVLVVVGGVLACYSLLVTVAFIIFWVRSKRSRLLHSDYMNMTPRRPGPTRKHYQPYAPPRDFAAYRSRVKFSRSADAPAYQQGQNQLYNELNLGRREEYDVLDKRRGRDPEMGGKPRRKNPQEGLYNELQKDKMAEAYSEIGMKGERRRGKGHDGLYQGLSTATKDTYDALHMQALPPR

SEQ ID NO: 782 - protein, 5 aa, Artificial Sequence
  source: /note="Description of Artificial Sequence: Synthetic peptide"
DYGVS

SEQ ID NO: 783 - protein, 16 aa, Artificial Sequence
  source: /note="Description of Artificial Sequence: Synthetic peptide"
VIWGSETTYYNSALKS

SEQ ID NO: 784 - protein, 16 aa, Artificial Sequence
  source: /note="Description of Artificial Sequence: Synthetic peptide"
VIWGSETTYYSSSLKS

SEQ ID NO: 785 - protein, 16 aa, Artificial Sequence
  source: /note="Description of Artificial Sequence: Synthetic peptide"
VIWGSETTYYQSSLKS

SEQ ID NO: 786 - protein, 16 aa, Artificial Sequence
  source: /note="Description of Artificial Sequence: Synthetic peptide"
VIWGSETTYYNSSLKS

SEQ ID NO: 787 - protein, 12 aa, Artificial Sequence
  source: /note="Description of Artificial Sequence: Synthetic peptide"
HYYYGGSYAMDY

SEQ ID NO: 788 - protein, 11 aa, Artificial Sequence
  source: /note="Description of Artificial Sequence: Synthetic peptide"
RASQDISKYLN

SEQ ID NO: 789 - protein, 7 aa, Artificial Sequence
  source: /note="Description of Artificial Sequence: Synthetic peptide"
HTSRLHS

SEQ ID NO: 790 - protein, 9 aa, Artificial Sequence
  source: /note="Description of Artificial Sequence: Synthetic peptide"
QQGNTLPYT

SEQ ID NO: 791 - protein, 119 aa, Artificial Sequence
  source: /note="Description of Artificial Sequence: Synthetic polypeptide"
QVQLLESGAELVRPGSSVKISCKASGYAFSSYWMNWVKQRPGQGLEWIGQIYPGDGDTNYNGKFKGQATLTADKSSSTAYMQLSGLTSEDSAVYSCARKTISSVVDFYFDYWGQGTTVT

SEQ ID NO: 792 - protein, 111 aa, Artificial Sequence
  source: /note="Description of Artificial Sequence: Synthetic polypeptide"
ELVLTQSPKFMSTSVGDRVSVTCKASQNVGTNVAWYQQKPGQSPKPLIYSATYRNSGVPDRFTGSGSGTDFTLTITNVQSKDLADYFYFCQYNRYPYTSGGGTKLEIKRRS

SEQ ID NO: 793 - protein, 465 aa, Artificial Sequence
  source: /note="Description of Artificial Sequence: Synthetic polypeptide"
DIQMTQTTSSLSASLGDRVTISCRASQDISKYLNWYQQKPDGTVKLLIYHTSRLHSGVPSRFSGSGSGTDYSLTISNLEQEDIATYFCQQGNTLPYTFGGGTKLEITGGGGSGGGGSGGGGSEVKLQESGPGLVAPSQSLSVTCTVSGVSLPDYGVSWIRQPPRKGLEWLGVIWGSETTYYNSALKSRLTIIKDNSKSQVFLKMNSLQTDDTAIYYCAKHYYYGGSYAMDYWGQGTSVTVSSTTTPAPRPPTPAPTIASQPLSLRPEACRPAAGGAVHTRGLDFACDIYIWAPLAGTCGVLLLSLVITLYCKRGRKKLLYIFKQPFMRPVQTTQEEDGCSCRFPEEEEGGCELRVKFSRSADAPAYKQGQNQLYNELNLGRREEYDVLDKRRGRDPEMGGKPRRKNPQEGLYNELQKDKMAEAYSEIGMKGERRRGKGHDGLYQGLSTATKDTYDALHMQALPPR

SEQ ID NO: 794 - protein, 18 aa, Artificial Sequence
  source: /note="Description of Artificial Sequence: Synthetic peptide"
GSTSGSGKPGSGEGSTKG

SEQ ID NO: 795 - protein, 35 aa, Artificial Sequence
  source: /note="Description of Artificial Sequence: Synthetic polypeptide"
TKKKYSSSVHDPNGEFMFMRAVNTAKKSRLTDVTL

SEQ ID NO: 796 - DNA, 63 bp, Artificial Sequence
  source: /note="Description of Artificial Sequence: Synthetic oligonucleotide"
atggccctccctgtcaccgccctgctgcttccgctggctcttctgctccacgccgctcggccc

SEQ ID NO: 797 - DNA, 72 bp, Artificial Sequence
  source: /note="Description of Artificial Sequence: Synthetic oligonucleotide"
atctacatttgggcccctctggctggtacttgcggggtcctgctgctttcactcgtgatcactctttactgt

SEQ ID NO: 798 - DNA, 126 bp, Artificial Sequence
  source: /note="Description of Artificial Sequence: Synthetic polynucleotide"
aagcgcggtcggaagaagctgctgtacatctttaagcaacccttcatgaggcctgtgcagactactcaagaggaggacggctgttcatgccggttcccagaggaggaggaaggcggctgcgaactg

SEQ ID NO: 799 - DNA, 336 bp, Artificial Sequence
  source: /note="Description of Artificial Sequence: Synthetic polynucleotide"
cgcgtgaaattcagccgcagcgcagatgctccagcctacaagcaggggcagaaccagctctacaacgaactcaatcttggtcggagagaggagtacgacgtgctggacaagcggagaggacgggacccagaaatgggcgggaagccgcgcagaaagaatccccaagagggcctgtacaacgagctccaaaaggataagatggcagaagcctatagcgagattggtatgaaaggggaacgcagaagaggcaaaggccacgacggactgtaccagggactcagcaccgccaccaaggacacctatgacgctcttcacatgcaggccctgccgcctcgg
